(19) United States
(12) Patent Application Publication
(10) Pub. No.: US 2006/0057582 A1
(43) Pub. Date: Mar. 16, 2006

(54) 83 human secreted proteins

(76) Inventors: Craig A. Rosen, Laytonsville, MD (US); George A. Komatsoulis, Silver Spring, MD (US); Charles E. Birse, North Potomac, MD (US); Gil H. Choi, Rockville, MD (US); Henrik S. Olsen, Gaithersburg, MD (US); Jian Ni, Germantown, MD (US); Adam Bell, Germantown, MD (US)

Correspondence Address: HUMAN GENOME SCIENCES INC;INTELLECTUAL PROPERTY DEPT., 14200 SHADY GROVE ROAD, ROCKVILLE, MD, 20850, US

(21) Appl. No.: 10/644,807

(22) Filed: Aug. 21, 2003

Related U.S. Application Data
(63) Continuation of application No. PCT/US02/05064, filed on Feb. 21, 2002.
(60) Provisional application No. 60/270,658, filed on Feb. 23, 2001.
(60) Provisional application No. 60/304,444, filed on Jul. 12, 2001.

(51) Int. Cl. C12Q 1/68; C07H 21/04; C12N 9/00

(52) U.S. Cl. 435/6; 435/69.1; 435/183; 435/320.1; 435/325; 530/350; 536/23.2

(57) ABSTRACT

The present invention relates to novel human secreted proteins and isolated nucleic acids containing the coding regions of the genes encoding such proteins. Also provided are vectors, host cells, antibodies, and recombinant methods for producing human secreted proteins. The invention further relates to diagnostic and therapeutic methods useful for diagnosing and treating diseases, disorders, and/or conditions related to these novel human secreted proteins.

### CROSS REFERENCE TO RELATED APPLICATIONS

[0001] This application is a continuation of International Application No. PCT/US02/05064, filed Feb. 21, 2002, which in turn claims benefit under 35 U.S.C. §119(e) based on U.S. Provisional Application Nos. 60/270,658 and 60/304,444, filed Feb. 23, 2001 and Jul. 12, 2001, respectively; each of the above applications are hereby incorporated by reference in their entireties.

### FIELD OF THE INVENTION

[0002] This invention relates to newly identified polynucleotides, polypeptides encoded by these polynucleotides, antibodies that bind these polypeptides, uses of such polynucleotides, polypeptides, and antibodies, and their production.

### BACKGROUND OF THE INVENTION

[0003] Unlike bacterium, which exist as a single compartment surrounded by a membrane, human cells and other eucaryotes are subdivided by membranes into many functionally distinct compartments. Each membrane-bounded compartment, or organelle, contains different proteins essential for the function of the organelle. The cell uses “sorting signals,” which are amino acid motifs located within the protein, to target proteins to particular cellular organelles.

[0004] One type of sorting signal, called a signal sequence, a signal peptide, or a leader sequence, directs a class of proteins to an organelle called the endoplasmic reticulum (ER). The ER separates the membrane-bounded proteins from all other types of proteins. Once localized to the ER, both groups of proteins can be further directed to another organelle called the Golgi apparatus. Here, the Golgi distributes the proteins to vesicles, including secretory vesicles, the cell membrane, lysosomes, and the other organelles.

[0005] Proteins targeted to the ER by a signal sequence can be released into the extracellular space as a secreted protein. For example, vesicles containing secreted proteins can fuse with the cell membrane and release their contents into the extracellular space—a process called exocytosis. Exocytosis can occur constitutively or after receipt of a triggering signal. In the latter case, the proteins are stored in secretory vesicles (or secretory granules) until exocytosis is triggered. Similarly, proteins residing on the cell membrane can also be secreted into the extracellular space by proteolytic cleavage of a “linker” holding the protein to the membrane.

[0006] Despite the great progress made in recent years, only a small number of genes encoding human secreted proteins have been identified. These secreted proteins include the commercially valuable human insulin, interferon, Factor VIII, human growth hormone, tissue plasminogen activator, and erythropoeitin. Thus, in light of the pervasive role of secreted proteins in human physiology, a need exists for identifying and characterizing novel human secreted proteins and the genes that encode them. This knowledge will allow one to detect, to treat, and to prevent medical diseases, disorders, and/or conditions by using secreted proteins or the genes that encode them.

### SUMMARY OF THE INVENTION

[0007] The present invention relates to novel polynucleotides and the encoded polypeptides. Moreover, the present invention relates to vectors, host cells, antibodies, and recombinant and synthetic methods for producing the polypeptides and polynucleotides. Also provided are diagnostic methods for detecting diseases, disorders, and/or conditions related to the polypeptides and polynucleotides, and therapeutic methods for treating such diseases, disorders, and/or conditions. The invention further relates to screening methods for identifying binding partners of the polypeptides.

[0008] In other embodiments, the present invention encompasses methods of preventing, treating, diagnosing, or ameliorating a disease or disorder. In preferred embodiments, the present invention encompasses a method of treating a disease or disorder listed in the “Preferred Indications” column of Table 1C; comprising administering to a patient in which such treatment, prevention, or amelioration is desired a protein, nucleic acid, or antibody of the invention (or fragment or variant thereof) represented by Table 1A and Table 1C (in the same row as the disease or disorder to be treated is listed in the “Preferred Indications” column of Table 1C) in an amount effective to treat, prevent, or ameliorate the disease or disorder.

[0009] In another embodiment, the present invention also encompasses methods of preventing, treating, diagnosing, or ameliorating a disease or disorder listed in the “Preferred Indications” column of Table 1C; comprising administering to a patient combinations of the proteins, nucleic acids, or antibodies of the invention (or fragments or variants thereof) as represented by Table 1A and Table 1C.

### DETAILED DESCRIPTION

Tables

[0010] Table 1A summarizes information concerning certain polynucleotides and polypeptides of the invention. The first column provides the gene number in the application for each clone identifier. The second column provides a unique clone identifier, “cDNA clone ID”, for a cDNA clone related to each contig sequence disclosed in Table 1A. Third column, the cDNA Clones identified in the second column were deposited as indicated (i.e. by ATCC Deposit No:Z and deposit date) Some of the deposits contain multiple different clones corresponding to the same gene. In the fourth column, “Vector” refers to the type of vector contained in the corresponding cDNA Clone identified in the second column. In the fifth column, the nucleotide sequence identified as “NT SEQ ID NO:X” was assembled from partially homologous (“overlapping”) sequences obtained from the corresponding cDNA clone identified in the second column and, in some cases, from additional related cDNA clones. The overlapping sequences were assembled into a single contiguous sequence of high redundancy (usually three to five overlapping sequences at each nucleotide position), resulting in a final sequence identified as SEQ ID NO:X. In the sixth column, “Total NT Seq.” refers to the total number of nucleotides in the contig sequence identified as SEQ ID NO:X.” The deposited clone may contain all or most of these sequences, reflected by the nucleotide position indicated as “5′ NT of Clone Seq.” (seventh column) and the “3′ NT of Clone Seq.” (eighth column) of SEQ ID NO:X. In the ninth column, the nucleotide position of SEQ ID NO:X of the putative start codon (methionine) is identified as “5′ NT of Start Codon.” Similarly, in column ten, the nucleotide position of SEQ ID NO:X of the predicted signal sequence is identified as “5′ NT of First AA of Signal Pep.” In the eleventh column, the translated amino acid sequence, as shown in the sequence listing, is identified as “AA SEQ ID NO:Y,” although other reading frames can also be routinely translated using known molecular biology techniques. The polypeptides produced by these alternative open reading frames are specifically contemplated by the present invention.

[0011] In the twelfth and thirteenth columns of Table 1A, the first and last amino acid position of SEQ ID NO:Y of the predicted signal peptide is identified as “First AA of Sig Pep” and “Last AA of Sig Pep.,” respectively. In the fourteenth column, the predicted first amino acid position of SEQ ID NO:Y of the secreted portion is identified as “Predicted First AA of Secreted Portion”. The amino acid position of SEQ ID NO:Y of the last amino acid encoded by the open reading frame is identified in the fifteenth column as “Last AA of ORF”.

[0012] SEQ ID NO:X (where X may be any of the polynucleotide sequences disclosed in the sequence listing) and the translated SEQ ID NO:Y (where Y may be any of the polypeptide sequences disclosed in the sequence listing) are sufficiently accurate and otherwise suitable for a variety of uses well known in the art and described further below. For instance, SEQ ID NO:X is useful for designing nucleic acid hybridization probes that will detect nucleic acid sequences contained in SEQ ID NO:X or the cDNA contained in the deposited clone. These probes will also hybridize to nucleic acid molecules in biological samples, thereby enabling a variety of forensic and diagnostic methods of the invention. Similarly, polypeptides identified from SEQ ID NO:Y may be used, for example, to generate antibodies which bind specifically to proteins containing the polypeptides and the secreted proteins encoded by the cDNA clones identified in Table 1A and/or elsewhere herein.

[0013] Nevertheless, DNA sequences generated by sequencing reactions can contain sequencing errors. The errors exist as misidentified nucleotides, or as insertions or deletions of nucleotides in the generated DNA sequence. The erroneously inserted or deleted nucleotides cause frame shifts in the reading frames of the predicted amino acid sequence. In these cases, the predicted amino acid sequence diverges from the actual amino acid sequence, even though the generated DNA sequence may be greater than 99.9% identical to the actual DNA sequence (for example, one base insertion or deletion in an open reading frame of over 1000 bases).

[0014] Accordingly, for those applications requiring precision in the nucleotide sequence or the amino acid sequence, the present invention provides not only the generated nucleotide sequence identified as SEQ ID NO:X, and the predicted translated amino acid sequence identified as SEQ ID NO:Y, but also a sample of plasmid DNA containing a human cDNA of the invention deposited with the ATCC, as set forth in Table 1A. The nucleotide sequence of each deposited plasmid can readily be determined by sequencing the deposited plasmid in accordance with known methods.

[0015] The predicted amino acid sequence can then be verified from such deposits. Moreover, the amino acid sequence of the protein encoded by a particular plasmid can also be directly determined by peptide sequencing or by expressing the protein in a suitable host cell containing the deposited human cDNA, collecting the protein, and determining its sequence.

[0016] Also provided in Table 1A is the name of the vector which contains the cDNA plasmid. Each vector is routinely used in the art. The following additional information is provided for convenience.

[0017] Vectors Lambda Zap (U.S. Pat. Nos. 5,128,256 and 5,286,636), Uni-Zap XR (U.S. Pat. Nos. 5,128,256 and 5,286,636), Zap Express (U.S. Pat. Nos. 5,128,256 and 5,286,636), pBluescript (pBS) (Short, J. M. et al., Nucleic Acids Res. 16:7583-7600 (1988); Alting-Mees, M. A. and Short, J. M., Nucleic Acids Res. 17:9494 (1989)) and pBK (Alting-Mees, M. A. et al., Strategies 5:58-61 (1992)) are commercially available from Stratagene Cloning Systems, Inc., 11011 N. Torrey Pines Road, La Jolla, Calif., 92037. pBS contains an ampicillin resistance gene and pBK contains a neomycin resistance gene. Phagemid pBS may be excised from the Lambda Zap and Uni-Zap XR vectors, and phagemid pBK may be excised from the Zap Express vector. Both phagemids may be transformed into E. coli strain XL-1 Blue, also available from Stratagene.

[0018] Vectors pSport1, pCMVSport 1.0, pCMVSport 2.0 and pCMVSport 3.0, were obtained from Life Technologies, Inc., P.O. Box 6009, Gaithersburg, Md. 20897. All Sport vectors contain an ampicillin resistance gene and may be transformed into E. coli strain DH10B, also available from Life Technologies. See, for instance, Gruber, C. E., et al., Focus 15:59 (1993). Vector lafmid BA (Bento Soares, Columbia University, New York, N.Y.) contains an ampicillin resistance gene and can be transformed into E. coli strain XL-1 Blue. Vector pCR®2.1, which is available from Invitrogen, 1600 Faraday Avenue, Carlsbad, Calif. 92008, contains an ampicillin resistance gene and may be transformed into E. coli strain DH10B, available from Life Technologies. See, for instance, Clark, J. M., Nuc. Acids Res. 16:9677-9686 (1988) and Mead, D. et al., Bio/Technology 9: (1991).

[0019] The present invention also relates to the genes corresponding to SEQ ID NO:X, SEQ ID NO:Y, and/or a deposited cDNA (cDNA Clone ID). The corresponding gene can be isolated in accordance with known methods using the sequence information disclosed herein. Such methods include, but are not limited to, preparing probes or primers from the disclosed sequence and identifying or amplifying the corresponding gene from appropriate sources of genomic material.

[0020] Also provided in the present invention are allelic variants, orthologs, and/or species homologs. Procedures known in the art can be used to obtain full-length genes, allelic variants, splice variants, full-length coding portions, orthologs, and/or species homologs of genes corresponding to SEQ ID NO:X and SEQ ID NO:Y using information from the sequences disclosed herein or the clones deposited with the ATCC. For example, allelic variants and/or species homologs may be isolated and identified by making suitable probes or primers from the sequences provided herein and screening a suitable nucleic acid source for allelic variants and/or the desired homologue.

[0021] The present invention provides a polynucleotide comprising, or alternatively consisting of, the nucleic acid sequence of SEQ ID NO:X and/or a cDNA contained in ATCC deposit Z. The present invention also provides a polypeptide comprising, or alternatively, consisting of, the polypeptide sequence of SEQ ID NO:Y, a polypeptide encoded by SEQ ID NO:X, and/or a polypeptide encoded by a cDNA contained in ATCC deposit Z. Polynucleotides encoding a polypeptide comprising, or alternatively consisting of the polypeptide sequence of SEQ ID NO:Y, a polypeptide encoded by SEQ ID NO:X and/or a polypeptide encoded by the cDNA contained in ATCC deposit Z, are also encompassed by the invention. The present invention further encompasses a polynucleotide comprising, or alternatively consisting of the complement of the nucleic acid sequence of SEQ ID NO:X, and/or the complement of the coding strand of the cDNA contained in ATCC deposit Z.

[0022] Table 1B summarizes some of the polynucleotides encompassed by the invention (including cDNA clones related to the sequences (Clone ID NO.), contig sequences (contig identifier “Contig ID:”) and contig nucleotide sequence identifier (SEQ ID NO:X)) and further summarizes certain characteristics of these polynucleotides and the polypeptides encoded thereby. The first column provides the gene number in the application for each clone identifier. The second column provides a unique clone identifier, “Clone ID NO”, for a cDNA clone related to each contig sequence disclosed in Table 1A and/or 1B. The third column provides a unique contig identifier, “Contig ID:” for each of the contig sequences disclosed in Table 1B. The fourth column provides the sequence identifier, “SEQ ID NO:X”, for each of the contig sequences disclosed in Table 1A and/or 1B. The fifth column, “ORF (From-To)”, provides the location (i.e., nucleotide position numbers) within the polynucleotide sequence of SEQ ID NO:X that delineate the preferred open reading frame (ORF) that encodes the amino acid sequence shown in the sequence listing and referenced in Table 1B as SEQ ID NO:Y (column 6). Column 7 lists residues comprising predicted epitopes in the polypeptides encoded by each of the preferred ORFs (SEQ ID NO:Y). Identification of potential immunogenic regions was performed according to the method of Jameson and Wolf (CABIOS, 4; 181-186 (1988)); specifically, the Genetics Computer Group (GCG) implementation of this algorithm, embodied in the program PEPTIDESTRUCTURE (Wisconsin Package v10.0, Genetics Computer Group (GCG), Madison, Wisc.). This method returns a measure of the probability that a given residue is found on the surface of the protein. Regions where the antigenic index score is greater than 0.9 over at least 6 amino acids are indicated in Table 1B as “Predicted Epitopes”. In particular embodiments, polypeptides of the invention comprise, or alternatively consist of, one, two, three, four, five or more of the predicted epitopes described in Table 1B. It will be appreciated that depending on the analytical criteria used to predict antigenic determinants, the exact address of the determinant may vary slightly. Column 8, “Tissue Distribution” shows the expression profile of tissue, cells, and/or cell line libraries which express the polynucleotides of the invention. The first number in column 8 (preceding the colon), represents the tissue/cell source identifier code corresponding to the key provided in Table 4. Expression of these polynucleotides was not observed in the other tissues and/or cell libraries tested. For those identifier codes in which the first two letters are not “AR”, the second number in column 8 (following the colon), represents the number of times a sequence corresponding to the reference polynucleotide sequence (e.g., SEQ ID NO:X) was identified in the corresponding tissue/cell source. Those tissue/cell source identifier codes in which the first two letters are “AR” designate information generated using DNA array technology. Utilizing this technology, cDNAs were amplified by PCR and then transferred, in duplicate, onto the array. Gene expression was assayed through hybridization of first strand cDNA probes to the DNA array. cDNA probes were generated from total RNA extracted from a variety of different tissues and cell lines. Probe synthesis was performed in the presence of ³³P dCTP, using oligo(dT) to prime reverse transcription. After hybridization, high stringency washing conditions were employed to remove non-specific hybrids from the array. The remaining signal, emanating from each gene target, was measured using a Phosphorimager. Gene expression was reported as Phosphor Stimulating Luminescence (PSL) which reflects the level of phosphor signal generated from the probe hybridized to each of the gene targets represented on the array. A local background signal subtraction was performed before the total signal generated from each array was used to normalize gene expression between the different hybridizations. The value presented after “[array code]:” represents the mean of the duplicate values, following background subtraction and probe normalization. One of skill in the art could routinely use this information to identify normal and/or diseased tissue(s) which show a predominant expression pattern of the corresponding polynucleotide of the invention or to identify polynucleotides which show predominant and/or specific tissue and/or cell expression.

[0023] Table 1C. The polynucleotides or polypeptides, or agonists or antagonists of the present invention can be used in assays to test for one or more biological activities. If these polynucleotides and polypeptides do exhibit activity in a particular assay, it is likely that these molecules may be involved in the diseases associated with the biological activity. Thus, the polynucleotides or polypeptides, or agonists or antagonists could be used to treat the associated disease.

[0024] The present invention encompasses methods of preventing, treating, diagnosing, or ameliorating a disease or disorder. In preferred embodiments, the present invention encompasses a method of treating a disease or disorder listed in the “Preferred Indications” column of Table 1C; comprising administering to a patient in which such treatment, prevention, or amelioration is desired a protein, nucleic acid, or antibody of the invention (or fragment or variant thereof) in an amount effective to treat, prevent, diagnose, or ameliorate the disease or disorder. The first and seccond columns of Table 1C show the “Gene No.” and “cDNA Clone ID No.”, respectively, indicating certain nucleic acids and proteins (or antibodies against the same) of the invention (including polynucleotide, polypeptide, and antibody fragments or variants thereof) that may be used in preventing, treating, diagnosing, or ameliorating the disease(s) or disorder(s) indicated in the corresponding row in Column 3 of Table 1C.

[0025] In another embodiment, the present invention also encompasses methods of preventing, treating, diagnosing, or ameliorating a disease or disorder listed in the “Preferred Indications” column of Table 1C; comprising administering to a patient combinations of the proteins, nucleic acids, or antibodies of the invention (or fragments or variants thereof), sharing similar indications as shown in the corresponding rows in Column 3 of Table 1C.

[0026] The “Preferred Indication” column describes diseases, disorders, and/or conditions that may be treated, prevented, diagnosed, or ameliorated by a protein, nucleic acid, or antibody of the invention (or fragment or variant thereof).

[0027] The recitation of “Cancer” in the “Preferred Indication” column indicates that the corresponding nucleic acid and protein, or antibody against the same, of the invention (or fragment or variant thereof) may be used for example, to diagnose, treat, prevent, and/or ameliorate diseases and/or disorders relating to neoplastic diseases (e.g., leukemias, cancers, and/or as described below under “Hyperproliferative Disorders”).

[0028] In specific embodiments, a protein, nucleic acid, or antibody of the invention (or fragment or variant thereof) having a “Cancer” recitation in the “Preferred Indication” column of Table 1C may be used for example, to diagnose, treat, prevent, and/or ameliorate a neoplasm located in a tissue selected from the group consisting of: colon, abdomen, bone, breast, digestive system, liver, pancreas, prostate, peritoneum, lung, blood (e.g., leukemia), endocrine glands (adrenal, parathyroid, pituitary, testicles, ovary, thymus, thyroid), uterus, eye, head and neck, nervous (central and peripheral), lymphatic system, pelvic, skin, soft tissue, spleen, thoracic, and urogenital.

[0029] In specific embodiments, a protein, nucleic acid, or antibody of the invention (or fragment or variant thereof) having a “Cancer” recitation in the “Preferred Indication” column of Table 1C, may be used for example, to diagnose, treat, prevent, and/or ameliorate a pre-neoplastic condition, selected from the group consisting of: hyperplasia (e.g., endometrial hyperplasia and/or as described in the section entitled “Hyperproliferative Disorders”), metaplasia (e.g., connective tissue metaplasia, atypical metaplasia, and/or as described in the section entitled “Hyperproliferative Disorders”), and/or dysplasia (e.g., cervical dysplasia, and bronchopulmonary dysplasia).

[0030] In another specific embodiment, a protein, nucleic acid, or antibody of the invention (or fragment or variant thereof) having a “Cancer” recitation in the “Preferred Indication” column of Table 1C, may be used for example, to diagnose, treat, prevent, and/or ameliorate a benign dysproliferative disorder selected from the group consisting of: benign tumors, fibrocystic conditions, tissue hypertrophy, and/or as described in the section entitled “Hyperproliferative Disorders”.

[0031] The recitation of “Immune/Hematopoietic” in the “Preferred Indication” column indicates that the corresponding nucleic acid and protein, or antibody against the same, of the invention (or fragment or variant thereof), may be used for example, to diagnose, treat, prevent, and/or ameliorate diseases and/or disorders relating to neoplastic diseases (e.g., as described below under “Hyperproliferative Disorders”), blood disorders (e.g., as described below under “Immune Activity” “Cardiovascular Disorders” and/or “Blood-Related Disorders”), and infections (e.g., as described below under “Infectious Disease”).

[0032] In specific embodiments, a protein, nucleic acid, or antibody of the invention (or fragment or variant thereof) having the “Immune/Hematopoietic” recitation in the “Preferred Indication” column of Table 1C, may be used for example, to diagnose, treat, prevent, and/or ameliorate a disease or disorder selected from the group consisting of: anemia, pancytopenia, leukopenia, thrombocytopenia, leukemias, Hodgkin's disease, non-Hodgkin's lymphoma, acute lymphocytic anemia (ALL), plasmacytomas, multiple myeloma, Burkitt's lymphoma, arthritis, asthma, AIDS, autoimmune disease, rheumatoid arthritis, granulomatous disease, immune deficiency, inflammatory bowel disease, sepsis, neutropenia, neutrophilia, psoriasis, immune reactions to transplanted organs and tissues, systemic lupus erythematosis, hemophilia, hypercoagulation, diabetes mellitus, endocarditis, meningitis, Lyme Disease, and allergies.

[0033] The recitation of “Reproductive” in the “Preferred Indication” column indicates that the corresponding nucleic acid and protein, or antibody against the same, of the invention (or fragment or variant thereof), may be used for example, to diagnose, treat, prevent, and/or ameliorate diseases and/or disorders relating to neoplastic diseases (e.g., as described below under “Hyperproliferative Disorders”), and disorders of the reproductive system (e.g., as described below under “Reproductive System Disorders”).

[0034] In specific embodiments, a protein, nucleic acid, or antibody of the invention (or fragment or variant thereof) having a “Reproductive” recitation in the “Preferred Indication” column of Table 1C, may be used for example, to diagnose, treat, prevent, and/or ameliorate a disease or disorder selected from the group consisting of: cryptorchism, prostatitis, inguinal hernia, varicocele, leydig cell tumors, verrucous carcinoma, prostatitis, malacoplakia, Peyronie's disease, penile carcinoma, squamous cell hyperplasia, dysmenorrhea, ovarian adenocarcinoma, Turner's syndrome, mucopurulent cervicitis, Sertoli-leydig tumors, ovarian cancer, uterine cancer, pelvic inflammatory disease, testicular cancer, prostate cancer, Klinefelter's syndrome, Young's syndrome, premature ejaculation, diabetes mellitus, cystic fibrosis, Kartagener's syndrome, testicular atrophy, testicular feminization, anorchia, ectopic testis, epididymitis, orchitis, gonorrhea, syphilis, testicular torsion, vasitis nodosa, germ cell tumors, stromal tumors, dysmenorrhea, retroverted uterus, endometriosis, fibroids, adenomyosis, anovulatory bleeding, amenorrhea, Cushing's syndrome, hydatidiform moles, Asherman's syndrome, premature menopause, precocious puberty, uterine polyps, dysfunctional uterine bleeding, cervicitis, chronic cervicitis, mucopurulent cervicitis, cervical dysplasia, cervical polyps, Nabothian cysts, cervical erosion, cervical incompetence, cervical neoplasms, pseudohermaphroditism, and premenstrual syndrome.

[0035] The recitation of “Musculoskeletal” in the “Preferred Indication” column indicates that the corresponding nucleic acid and protein, or antibody against the same, of the invention (or fragment or variant thereof), may be used for example, to diagnose, treat, prevent, and/or ameliorate diseases and/or disorders relating to neoplastic diseases (e.g., as described below under “Hyperproliferative Disorders”), and disorders of the immune system (e.g., as described below under “Immune Activity”).

[0036] In specific embodiments, a protein, nucleic acid, or antibody of the invention (or fragment or variant thereof) having a “Musculoskeletal” recitation in the “Preferred Indication” column of Table 1C, may be used for example, to diagnose, treat, prevent, and/or ameliorate a disease or disorder selected from the group consisting of: bone cancers (e.g., osteochondromas, benign chondromas, chondroblastoma, chondromyxoid fibromas, osteoid osteomas, giant cell tumors, multiple myeloma, osteosarcomas), Paget's Disease, rheumatoid arthritis, systemic lupus erythematosus, osteomyelitis, Lyme Disease, gout, bursitis, tendonitis, osteoporosis, osteoarthritis, muscular dystrophy, mitochondrial myopathy, cachexia, and multiple sclerosis.

[0037] The recitation of “Cardiovascular” in the “Preferred Indication” column indicates that the corresponding nucleic acid and protein, or antibody against the same, of the invention (or fragment or variant thereof), may be used for example, to diagnose, treat, prevent, and/or ameliorate diseases and/or disorders relating to neoplastic diseases (e.g., as described below under “Hyperproliferative Disorders”), and disorders of the cardiovascular system (e.g., as described below under “Cardiovascular Disorders”).

[0038] In specific embodiments, a protein, nucleic acid, or antibody of the invention (or fragment or variant thereof) having a “Cardiovascular” recitation in the “Preferred Indication” column of Table 1C, may be used for example, to diagnose, treat, prevent, and/or ameliorate a disease or disorder selected from the group consisting of: myxomas, fibromas, rhabdomyomas, cardiovascular abnormalities (e.g., congenital heart defects, cerebral arteriovenous malformations, septal defects), heart disease (e.g., heart failure, congestive heart disease, arrhythmia, tachycardia, fibrillation, pericardial Disease, endocarditis), cardiac arrest, heart valve disease (e.g., stenosis, regurgitation, prolapse), vascular disease (e.g., hypertension, coronary artery disease, angina, aneurysm, arteriosclerosis, peripheral vascular disease), hyponatremia, hypernatremia, hypokalemia, and hyperkalemia.

[0039] The recitation of “Mixed Fetal” in the “Preferred Indication” column indicates that the corresponding nucleic acid and protein, or antibody against the same, of the invention (or fragment or variant thereof), may be used for example, to diagnose, treat, prevent, and/or ameliorate diseases and/or disorders relating to neoplastic diseases (e.g., as described below under “Hyperproliferative Disorders”).

[0040] In specific embodiments, a protein, nucleic acid, or antibody of the invention (or fragment or variant thereof) having a “Mixed Fetal” recitation in the “Preferred Indication” column of Table 1C, may be used for example, to diagnose, treat, prevent, and/or ameliorate a disease or disorder selected from the group consisting of: spina bifida, hydranencephaly, neurofibromatosis, fetal alcohol syndrome, diabetes mellitus, PKU, Down's syndrome, Patau syndrome, Edwards syndrome, Turner syndrome, Apert syndrome, Carpenter syndrome, Conradi syndrome, Crouzon syndrome, cutis laxa, Cornelia de Lange syndrome, Ellis-van Creveld syndrome, Holt-Oram syndrome, Kartagener syndrome, Meckel-Gruber syndrome, Noonan syndrome, Pallister-Hall syndrome, Rubinstein-Taybi syndrome, Scimitar syndrome, Smith-Lemli-Opitz syndrome, thromocytopenia-absent radius (TAR) syndrome, Treacher Collins syndrome, Williams syndrome, Hirschsprung's disease, Meckel's diverticulum, polycystic kidney disease, Turner's syndrome, and gonadal dysgenesis, Klippel-Feil syndrome, Ostogenesis imperfecta, muscular dystrophy, Tay-Sachs disease, Wilm's tumor, neuroblastoma, and retinoblastoma.

[0041] The recitation of “Excretory” in the “Preferred Indication” column indicates that the corresponding nucleic acid and protein, or antibody against the same, of the invention (or fragment or variant thereof), may be used for example, to diagnose, treat, prevent, and/or ameliorate diseases and/or disorders relating to neoplastic diseases (e.g., as described below under “Hyperproliferative Disorders”) and renal disorders (e.g., as described below under “Renal Disorders”).

[0042] In specific embodiments, a protein, nucleic acid, or antibody of the invention (or fragment or variant thereof) having a “Excretory” recitation in the “Preferred Indication” column of Table 1C, may be used for example, to diagnose, treat, prevent, and/or ameliorate a disease or disorder selected from the group consisting of: bladder cancer, prostate cancer, benign prostatic hyperplasia, bladder disorders (e.g., urinary incontinence, urinary retention, urinary obstruction, urinary tract Infections, interstitial cystitis, prostatitis, neurogenic bladder, hematuria), renal disorders (e.g., hydronephrosis, proteinuria, renal failure, pyelonephritis, urolithiasis, reflux nephropathy, and unilateral obstructive uropathy).

[0043] The recitation of “Neural/Sensory” in the “Preferred Indication” column indicates that the corresponding nucleic acid and protein, or antibody against the same, of the invention (or fragment or variant thereof), may be used for example, to diagnose, treat, prevent, and/or ameliorate diseases and/or disorders relating to neoplastic diseases (e.g., as described below under “Hyperproliferative Disorders”) and diseases or disorders of the nervous system (e.g., as described below under “Neural Activity and Neurological Diseases”).

[0044] In specific embodiments, a protein, nucleic acid, or antibody of the invention (or fragment or variant thereof) having a “Neural/Sensory” recitation in the “Preferred Indication” column of Table 1C, may be used for example, to diagnose, treat, prevent, and/or ameliorate a disease or disorder selected from the group consisting of: brain cancer (e.g., brain stem glioma, brain tumors, central nervous system (Primary) lymphoma, central nervous system lymphoma, cerebellar astrocytoma, and cerebral astrocytoma, neurodegenerative disorders (e.g., Alzheimer's Disease, Creutzfeldt-Jakob Disease, Parkinson's Disease, and Idiopathic Presenile Dementia), encephalomyelitis, cerebral malaria, meningitis, metabolic brain diseases (e.g., phenylketonuria and pyruvate carboxylase deficiency), cerebellar ataxia, ataxia telangiectasia, and AIDS Dementia Complex, schizophrenia, attention deficit disorder, hyperactive attention deficit disorder, autism, and obsessive compulsive disorders.

[0045] The recitation of “Respiratory” in the “Preferred Indication” column indicates that the corresponding nucleic acid and protein, or antibody against the same, of the invention (or fragment or variant thereof), may be used for example, to diagnose, treat, prevent, and/or ameliorate diseases and/or disorders relating to neoplastic diseases (e.g., as described below under “Hyperproliferative Disorders”) and diseases or disorders of the respiratory system (e.g., as described below under “Respiratory Disorders”).

[0046] In specific embodiments, a protein, nucleic acid, or antibody of the invention (or fragment or variant thereof) having a “Respiratory” recitation in the “Preferred Indication” column of Table 1C, may be used for example, to diagnose, treat, prevent, and/or ameliorate a disease or disorder selected from the group consisting of: cancers of the respiratory system such as larynx cancer, pharynx cancer, trachea cancer, epiglottis cancer, lung cancer, squamous cell carcinomas, small cell (oat cell) carcinomas, large cell carcinomas, and adenocarcinomas. Allergic reactions, cystic fibrosis, sarcoidosis, histiocytosis X, infiltrative lung diseases (e.g., pulmonary fibrosis and lymphoid interstitial pneumonia), obstructive airway diseases (e.g., asthma, emphysema, chronic or acute bronchitis), occupational lung diseases (e.g., silicosis and asbestosis), pneumonia, and pleurisy.

[0047] The recitation of “Endocrine” in the “Preferred Indication” column indicates that the corresponding nucleic acid and protein, or antibody against the same, of the invention (or fragment or variant thereof), may be used for example, to diagnose, treat, prevent, and/or ameliorate diseases and/or disorders relating to neoplastic diseases (e.g., as described below under “Hyperproliferative Disorders”) and diseases or disorders of the respiratory system (e.g., as described below under “Respiratory Disorders”), renal disorders (e.g., as described below under “Renal Disorders”), and disorders of the endocrine system (e.g., as described below under “Endocrine Disorders”.

[0048] In specific embodiments, a protein, nucleic acid, or antibody of the invention (or fragment or variant thereof) having an “Endocrine” recitation in the “Preferred Indication” column of Table 1C, may be used for example, to diagnose, treat, prevent, and/or ameliorate a disease or disorder selected from the group consisting of: cancers of endocrine tissues and organs (e.g., cancers of the hypothalamus, pituitary gland, thyroid gland, parathyroid glands, pancreas, adrenal glands, ovaries, and testes), diabetes (e.g., diabetes insipidus, type I and type II diabetes mellitus), obesity, disorders related to pituitary glands (e.g., hyperpituitarism, hypopituitarism, and pituitary dwarfism), hypothyroidism, hyperthyroidism, goiter, reproductive disorders (e.g. male and female infertility), disorders related to adrenal glands (e.g., Addison's Disease, corticosteroid deficiency, and Cushing's Syndrome), kidney cancer (e.g., hypemephroma, transitional cell cancer, and Wilm's tumor), diabetic nephropathy, interstitial nephritis, polycystic kidney disease, glomerulonephritis (e.g., IgM mesangial proliferative glomerulonephritis and glomerulonephritis caused by autoimmune disorders; such as Goodpasture's syndrome), and nephrocalcinosis.

[0049] The recitation of “Digestive” in the “Preferred Indication” column indicates that the corresponding nucleic acid and protein, or antibody against the same, of the invention (or fragment or variant thereof), may be used for example, to diagnose, treat, prevent, and/or ameliorate diseases and/or disorders relating to neoplastic diseases (e.g., as described below under “Hyperproliferative Disorders”) and diseases or disorders of the gastrointestinal system (e.g., as described below under “Gastrointestinal Disorders”.

[0050] In specific embodiments, a protein, nucleic acid, or antibody of the invention (or fragment or variant thereof) having a “Digestive” recitation in the “Preferred Indication” column of Table 1C, may be used for example, to diagnose, treat, prevent, and/or ameliorate a disease or disorder selected from the group consisting of: ulcerative colitis, appendicitis, Crohn's disease, hepatitis, hepatic encephalopathy, portal hypertension, cholelithiasis, cancer of the digestive system (e.g., biliary tract cancer, stomach cancer, colon cancer, gastric cancer, pancreatic cancer, cancer of the bile duct, tumors of the colon (e.g., polyps or cancers), and cirrhosis), pancreatitis, ulcerative disease, pyloric stenosis, gastroenteritis, gastritis, gastric atropy, benign tumors of the duodenum, distension, irritable bowel syndrome, malabsorption, congenital disorders of the small intestine, bacterial and parasitic infection, megacolon, Hirschsprung's disease, aganglionic megacolon, acquired megacolon, colitis, anorectal disorders (e.g., anal fistulas, hemorrhoids), congenital disorders of the liver (e.g., Wilson's disease, hemochromatosis, cystic fibrosis, biliary atresia, and alpha1-antitrypsin deficiency), portal hypertension, cholelithiasis, and jaundice.

[0051] The recitation of “Connective/Epithelial” in the “Preferred Indication” column indicates that the corresponding nucleic acid and protein, or antibody against the same, of the invention (or fragment or variant thereof), may be used for example, to diagnose, treat, prevent, and/or ameliorate diseases and/or disorders relating to neoplastic diseases (e.g., as described below under “Hyperproliferative Disorders”), cellular and genetic abnormalities (e.g., as described below under “Diseases at the Cellular Level”), angiogenesis (e.g., as described below under “Anti-Angiogenesis Activity”), and or to promote or inhibit regeneration (e.g., as described below under “Regeneration”), and wound healing (e.g., as described below under “Wound Healing and Epithelial Cell Proliferation”).

[0052] In specific embodiments, a protein, nucleic acid, or antibody of the invention (or fragment or variant thereof) having a “Connective/Epithelial” recitation in the “Preferred Indication” column of Table 1C, may be used for example, to diagnose, treat, prevent, and/or ameliorate a disease or disorder selected from the group consisting of: connective tissue metaplasia, mixed connective tissue disease, focal epithelial hyperplasia, epithelial metaplasia, mucoepithelial dysplasia, graft v. host disease, polymyositis, cystic hyperplasia, cerebral dysplasia, tissue hypertrophy, Alzheimer's disease, lymphoproliferative disorder, Waldenstron's macroglobulinemia, Crohn's disease, pernicious anemia, idiopathic Addison's disease, glomerulonephritis, bullous pemphigoid, Sjogren's syndrome, diabetes mellitus, cystic fibrosis, osteoblastoma, osteoclastoma, osteosarcoma, chondrosarcoma, osteoporosis, osteocarthritis, periodontal disease, wound healing, relapsing polychondritis, vasculitis, polyarteritis nodosa, Wegener's granulomatosis, cellulitis, rheumatoid arthritis, psoriatic arthritis, discoid lupus erythematosus, systemic lupus erythematosus, scleroderma, CREST syndrome, Sjogren's syndrome, polymyositis, dermatomyositis, mixed connective tissue disease, relapsing polychondritis, vasculitis, Henoch-Schonlein syndrome, erythema nodosum, polyarteritis nodosa, temporal (giant cell) arteritis, Takayasu's arteritis, Wegener's granulomatosis, Reiter's syndrome, Behcet's syndrome, ankylosing spondylitis, cellulitis, keloids, Ehler Danlos syndrome, Marfan syndrome, pseudoxantoma elasticum, osteogenese imperfecta, chondrodysplasias, epidermolysis bullosa, Alport syndrome, and cutis laxa.

[0053] Moreover, polynucleotides, translation products and antibodies corresponding to this gene may be useful for the diagnosis, prognosis, prevention, and/or treatment of diseases and/or disorders associated with the following systems.

[0054] Table 2 summarizes homology and features of some of the polypeptides of the invention. The first column provides a unique clone identifier, “Clone ID NO”, corresponding to a cDNA clone disclosed in Table 1A or 1B. The second column provides the unique contig identifier, “Contig ID:” corresponding to contigs in Table 1B and allowing for correlation with the information in Table 1B. The third column provides the sequence identifier, “SEQ ID NO:X”, for the contig polynucleotide sequence. The fourth column provides the analysis method by which the homology/identity disclosed in the Table was determined. Comparisons were made between polypeptides encoded by the polynucleotides of the invention and either a non-redundant protein database (herein referred to as “NR”), or a database of protein families (herein referred to as “PFAM”) as further described below. The fifth column provides a description of the PFAM/NR hit having a significant match to a polypeptide of the invention. Column six provides the accession number of the PFAM/NR hit disclosed in the fifth column. Column seven, “Score/Percent Identity”, provides a quality score or the percent identity, of the hit disclosed in columns five and six. Columns 8 and 9, “NT From” and “NT To” respectively, delineate the polynucleotides in “SEQ ID NO:X” that encode a polypeptide having a significant match to the PFAM/NR database as disclosed in the fifth and sixth columns. In specific embodiments polypeptides of the invention comprise, or alternatively consist of, an amino acid sequence encoded by a polynucleotide in SEQ ID NO:X as delineated in columns 8 and 9, or fragments or variants thereof.

[0055] Table 3 provides polynucleotide sequences that may be disclaimed according to certain embodiments of the invention. The first column provides a unique clone identifier, “Clone ID NO”, for a cDNA clone related to contig sequences disclosed in Table 1B. The second column provides the sequence identifier, “SEQ ID NO:X”, for contig sequences disclosed in Table 1A and/or 1B. The third column provides the unique contig identifier, “Contig ID:”, for contigs disclosed in Table 1B. The fourth column provides a unique integer ‘a’ where ‘a’ is any integer between 1 and the final nucleotide minus 15 of SEQ ID NO:X, and the fifth column provides a unique integer ‘b’ where ‘b’ is any integer between 15 and the final nucleotide of SEQ ID NO:X, where both a and b correspond to the positions of nucleotide residues shown in SEQ ID NO:X, and where b is greater than or equal to a +14. For each of the polynucleotides shown as SEQ ID NO:X, the uniquely defined integers can be substituted into the general formula of a-b, and used to describe polynucleotides which may be preferably excluded from the invention. In certain embodiments, preferably excluded from the invention are at least one, two, three, four, five, ten, or more of the polynucleotide sequence(s) having the accession number(s) disclosed in the sixth column of this Table (including for example, published sequence in connection with a particular BAC clone). In further embodiments, preferably excluded from the invention are the specific polynucleotide sequence(s) contained in the clones corresponding to at least one, two, three, four, five, ten, or more of the available material having the accession numbers identified in the sixth column of this Table (including for example, the actual sequence contained in an identified BAC clone).

[0056] Table 4 provides a key to the tissue/cell source identifier code disclosed in Table 1B, column 8. Column 1 provides the tissue/cell source identifier code disclosed in Table 1B, Column 8. Columns 2-5 provide a description of the tissue or cell source. Codes corresponding to diseased tissues are indicated in column 6 with the word “disease”. The use of the word “disease” in column 6 is non-limiting. The tissue or cell source may be specific (e.g. a neoplasm), or may be disease-associated (e.g., a tissue sample from a normal portion of a diseased organ). Furthermore, tissues and/or cells lacking the “disease” designation may still be derived from sources directly or indirectly involved in a disease state or disorder, and therefore may have a further utility in that disease state or disorder. In numerous cases where the tissue/cell source is a library, column 7 identifies the vector used to generate the library.

[0057] Table 5, column 1, provides a nucleotide sequence identifier, “SEQ ID NO:X,” that matches a nucleotide SEQ ID NO:X disclosed in Table 1A, column 5. Table 5, column 2, provides the chromosomal location, “Cytologic Band or Chromosome,” of polynucleotides corresponding to SEQ ID NO:X. Chromosomal location was determined by finding exact matches to EST and cDNA sequences contained in the NCBI (National Center for Biotechnology Information) UniGene database. Given a presumptive chromosomal location, disease locus association was determined by comparison with the Morbid Map, derived from Online Mendelian Inheritance in Man (Online Mendelian Inheritance in Man, OMIM™. McKusick-Nathans Institute for Genetic Medicine, Johns Hopkins University (Baltimore, Md.) and National Center for Biotechnology Information, National Library of Medicine (Bethesda, Md.) 2000. World Wide Web URL: http://www.ncbi.nlm.nih.gov/omim/). If the putative chromosomal location of the Query overlapped with the chromosomal location of a Morbid Map entry, the OMIM reference identification number of the morbid map entry is provided in Table 5, column 3, labelled “OMIM Reference(s).” A key to the OMIM reference identification numbers is provided in Table 6.

[0058] Table 6 provides a key to the OMIM reference identification numbers disclosed in Table 5, column 3. OMIM reference identification numbers (Column 1) were derived from Online Mendelian Inheritance in Man (Online Mendelian Inheritance in Man, OMIM. McKusick-Nathans Institute for Genetic Medicine, Johns Hopkins University (Baltimore, Md.) and National Center for Biotechnology Information, National Library of Medicine, (Bethesda, Md.) 2000. World Wide Web URL: http://www.ncbi.nlm.nih.gov/omim/). Column 2 provides diseases associated with the cytologic band disclosed in Table 5, column 2, as determined using the Morbid Map database.

Definitions

[0059] The following definitions are provided to facilitate understanding of certain terms used throughout this specification.

[0060] In the present invention, “isolated” refers to material removed from its original environment (e.g., the natural environment if it is naturally occurring), and thus is altered “by the hand of man” from its natural state. For example, an isolated polynucleotide could be part of a vector or a composition of matter, or could be contained within a cell, and still be “isolated” because that vector, composition of matter, or particular cell is not the original environment of the polynucleotide. The term “isolated” does not refer to genomic or cDNA libraries, whole cell total or mRNA preparations, genomic DNA preparations (including those separated by electrophoresis and transferred onto blots), sheared whole cell genomic DNA preparations or other compositions where the art demonstrates no distinguishing features of the polynucleotide/sequences of the present invention.

[0061] In the present invention, a “secreted” protein refers to those proteins capable of being directed to the ER, secretory vesicles, or the extracellular space as a result of a signal sequence, as well as those proteins released into the extracellular space without necessarily containing a signal sequence. If the secreted protein is released into the extracellular space, the secreted protein can undergo extracellular processing to produce a “mature” protein. Release into the extracellular space can occur by many mechanisms, including exocytosis and proteolytic cleavage.

[0062] As used herein, a “polynucleotide” refers to a molecule having a nucleic acid sequence contained in SEQ ID NO:X (as described in column 5 of Table 1A), or cDNA clone (as described in column 2 of Table 1A and contained within a pool of plasmids deposited with the ATCC in ATCC Deposit No:Z). For example, the polynucleotide can contain the nucleotide sequence of the full length cDNA sequence, including the 5′ and 3′ untranslated sequences, the coding region, with or without a natural or artificial signal sequence, the protein coding region, as well as fragments, epitopes, domains, and variants of the nucleic acid sequence. Moreover, as used herein, a “polypeptide” refers to a molecule having an amino acid sequence encoded by a polynucleotide of the invention as broadly defined (obviously excluding poly-Phenylalanine or poly-Lysine peptide sequences which result from translation of a polyA tail of a sequence corresponding to a cDNA).

[0063] In the present invention, a representative plasmid containing the sequence of SEQ ID NO:X was deposited with the American Type Culture Collection (“ATCC”) and/or described in Table 1A. As shown in Table 1A, each cDNA is identified by a cDNA clone identifier and the ATCC Deposit Number (ATCC Deposit No:Z). Plasmids that were pooled and deposited as a single deposit have the same ATCC Deposit Number. The ATCC is located at 10801 University Boulevard, Manassas, Va. 20110-2209, USA. The ATCC deposit was made pursuant to the terms of the Budapest Treaty on the international recognition of the deposit of microorganisms for purposes of patent procedure.

[0064] A “polynucleotide” of the present invention also includes those polynucleotides capable of hybridizing, under stringent hybridization conditions, to sequences contained in SEQ ID NO:X, or the complement thereof (e.g., the complement of any one, two, three, four, or more of the polynucleotide fragments described herein) and/or sequences of the cDNA contained in the deposited clone (e.g., the complement of any one, two, three, four, or more of the polynucleotide fragments described herein). “Stringent hybridization conditions” refers to an overnight incubation at 42 degree C. in a solution comprising 50% formamide, 5×SSC (750 mM NaCl, 75 mM trisodium citrate), 50 mM sodium phosphate (pH 7.6), 5× Denhardt's solution, 10% dextran sulfate, and 20 μg/ml denatured, sheared salmon sperm DNA, followed by washing the filters in 0.1×SSC at about 65 degree C.

[0065] Also included within “polynucleotides” of the present invention are nucleic acid molecules that hybridize to the polynucleotides of the present invention at lower stringency hybridization conditions. Changes in the stringency of hybridization and signal detection are primarily accomplished through the manipulation of formamide concentration (lower percentages of formamide result in lowered stringency); salt conditions, or temperature. For example, lower stringency conditions include an overnight incubation at 37 degree C. in a solution comprising 6×SSPE (20×SSPE=3M NaCl; 0.2M NaH₂PO₄; 0.02M EDTA, pH 7.4), 0.5% SDS, 30% formamide, 100 μg/ml salmon sperm blocking DNA; followed by washes at 50 degree C. with 1×SSPE, 0.1% SDS. In addition, to achieve even lower stringency, washes performed following stringent hybridization can be done at higher salt concentrations (e.g. 5×SSC).

[0066] Note that variations in the above conditions may be accomplished through the inclusion and/or substitution of alternate blocking reagents used to suppress background in hybridization experiments. Typical blocking reagents include Denhardt's reagent, BLOTTO, heparin, denatured salmon sperm DNA, and commercially available proprietary formulations. The inclusion of specific blocking reagents may require modification of the hybridization conditions described above, due to problems with compatibility.

[0067] Of course, a polynucleotide which hybridizes only to polyA+ sequences (such as any 3′ terminal polyA+ tract of a cDNA shown in the sequence listing), or to a complementary stretch of T (or U) residues, would not be included in the definition of “polynucleotide,” since such a polynucleotide would hybridize to any nucleic acid molecule containing a poly (A) stretch or the complement thereof (e.g., practically any double-stranded cDNA clone generated using oligo dT as a primer).

[0068] The polynucleotides of the present invention can be composed of any polyribonucleotide or polydeoxribonucleotide, which may be unmodified RNA or DNA or modified RNA or DNA. For example, polynucleotides can be composed of single- and double-stranded DNA, DNA that is a mixture of single- and double-stranded regions, single- and double-stranded RNA, and RNA that is mixture of single- and double-stranded regions, hybrid molecules comprising DNA and RNA that may be single-stranded or, more typically, double-stranded or a mixture of single- and double-stranded regions. In addition, the polynucleotide can be composed of triple-stranded regions comprising RNA or DNA or both RNA and DNA. A polynucleotide may also contain one or more modified bases or DNA or RNA backbones modified for stability or for other reasons. “Modified” bases include, for example, tritylated bases and unusual bases such as inosine. A variety of modifications can be made to DNA and RNA; thus, “polynucleotide” embraces chemically, enzymatically, or metabolically modified forms.

[0069] In specific embodiments, the polynucleotides of the invention are at least 15, at least 30, at least 50, at least 100, at least 125, at least 500, or at least 1000 continuous nucleotides but are less than or equal to 300 kb, 200 kb, 100 kb, 50 kb, 15 kb, 10 kb, 7.5 kb, 5 kb, 2.5 kb, 2.0 kb, or 1 kb, in length. In a further embodiment, polynucleotides of the invention comprise a portion of the coding sequences, as disclosed herein, but do not comprise all or a portion of any intron. In another embodiment, the polynucleotides comprising coding sequences do not contain coding sequences of a genomic flanking gene (i.e., 5′ or 3′ to the gene of interest in the genome). In other embodiments, the polynucleotides of the invention do not contain the coding sequence of more than 1000, 500, 250, 100, 50, 25, 20, 15, 10, 5, 4, 3, 2, or 1 genomic flanking gene(s).

[0070] “SEQ ID NO:X” refers to a polynucleotide sequence described in column 5 of Table 1A, while “SEQ ID NO:Y” refers to a polypeptide sequence described in column 10 of Table 1A. SEQ ID NO:X is identified by an integer specified in column 6 of Table 1A. The polypeptide sequence SEQ ID NO:Y is a translated open reading frame (ORF) encoded by polynucleotide SEQ ID NO:X. The polynucleotide sequences are shown in the sequence listing immediately followed by all of the polypeptide sequences. Thus, a polypeptide sequence corresponding to polynucleotide sequence SEQ ID NO:2 is the first polypeptide sequence shown in the sequence listing. The second polypeptide sequence corresponds to the polynucleotide sequence shown as SEQ ID NO:3, and so on.

[0071] The polypeptides of the present invention can be composed of amino acids joined to each other by peptide bonds or modified peptide bonds, i.e., peptide isosteres, and may contain amino acids other than the 20 gene-encoded amino acids. The polypeptides may be modified by either natural processes, such as posttranslational processing, or by chemical modification techniques which are well known in the art. Such modifications are well described in basic texts and in more detailed monographs, as well as in a voluminous research literature. Modifications can occur anywhere in a polypeptide, including the peptide backbone, the amino acid side-chains and the amino or carboxyl termini. It will be appreciated that the same type of modification may be present in the same or varying degrees at several sites in a given polypeptide. Also, a given polypeptide may contain many types of modifications. Polypeptides may be branched, for example, as a result of ubiquitination, and they may be cyclic, with or without branching. Cyclic, branched, and branched cyclic polypeptides may result from posttranslation natural processes or may be made by synthetic methods. Modifications include acetylation, acylation, ADP-ribosylation, amidation, covalent attachment of flavin, covalent attachment of a heme moiety, covalent attachment of a nucleotide or nucleotide derivative, covalent attachment of a lipid or lipid derivative, covalent attachment of phosphotidylinositol, cross-linking, cyclization, disulfide bond formation, demethylation, formation of covalent cross-links, formation of cysteine, formation of pyroglutamate, formylation, gamma-carboxylation, glycosylation, GPI anchor formation, hydroxylation, iodination, methylation, myristoylation, oxidation, pegylation, proteolytic processing, phosphorylation, prenylation, racemization, selenoylation, sulfation, transfer-RNA mediated addition of amino acids to proteins such as arginylation, and ubiquitination. (See, for instance, PROTEINS—STRUCTURE AND MOLECULAR PROPERTIES, 2nd Ed., T. E. Creighton, W. H. Freeman and Company, New York (1993); POSTTRANSLATIONAL COVALENT MODIFICATION OF PROTEINS, B. C. Johnson, Ed., Academic Press, New York, pgs. 1-12 (1983); Seifter et al., Meth Enzymol 182:626-646 (1990); Rattan et al., Ann NY Acad Sci 663:48-62 (1992)).

[0072] The polypeptides of the invention can be prepared in any suitable manner. Such polypeptides include isolated naturally occurring polypeptides, recombinantly produced polypeptides, synthetically produced polypeptides, or polypeptides produced by a combination of these methods. Means for preparing such polypeptides are well understood in the art.

[0073] The polypeptides may be in the form of the secreted protein, including the mature form, or may be a part of a larger protein, such as a fusion protein (see below). It is often advantageous to include an additional amino acid sequence which contains secretory or leader sequences, pro-sequences, sequences which aid in purification, such as multiple histidine residues, or an additional sequence for stability during recombinant production.

[0074] The polypeptides of the present invention are preferably provided in an isolated form, and preferably are substantially purified. A recombinantly produced version of a polypeptide, including the secreted polypeptide, can be substantially purified using techniques described herein or otherwise known in the art, such as, for example, by the one-step method described in Smith and Johnson, Gene 67:31-40 (1988). Polypeptides of the invention also can be purified from natural, synthetic or recombinant sources using techniques described herein or otherwise known in the art, such as, for example, antibodies of the invention raised against the polypeptides of the present invention in methods which are well known in the art.

[0075] By a polypeptide demonstrating a “functional activity” is meant, a polypeptide capable of displaying one or more known functional activities associated with a full-length (complete) protein of the invention. Such functional activities include, but are not limited to, biological activity, antigenicity [ability to bind (or compete with a polypeptide for binding) to an anti-polypeptide antibody], immunogenicity (ability to generate antibody which binds to a specific polypeptide of the invention), ability to form multimers with polypeptides of the invention, and ability to bind to a receptor or ligand for a polypeptide.

[0076] “A polypeptide having functional activity” refers to polypeptides exhibiting activity similar, but not necessarily identical to, an activity of a polypeptide of the present invention, including mature forms, as measured in a particular assay, such as, for example, a biological assay, with or without dose dependency. In the case where dose dependency does exist, it need not be identical to that of the polypeptide, but rather substantially similar to the dose-dependence in a given activity as compared to the polypeptide of the present invention (i.e., the candidate polypeptide will exhibit greater activity or not more than about 25-fold less and, preferably, not more than about tenfold less activity, and most preferably, not more than about three-fold less activity relative to the polypeptide of the present invention).

[0077] The functional activity of the polypeptides, and fragments, variants derivatives, and analogs thereof, can be assayed by various methods.

[0078] For example, in one embodiment where one is assaying for the ability to bind or compete with full-length polypeptide of the present invention for binding to an antibody to the full length polypeptide, various immunoassays known in the art can be used, including but not limited to, competitive and non-competitive assay systems using techniques such as radioimmunoassays, ELISA (enzyme linked immunosorbent assay), “sandwich” immunoassays, immunoradiometric assays, gel diffusion precipitation reactions, immunodiffusion assays, in situ immunoassays (using colloidal gold, enzyme or radioisotope labels, for example), western blots, precipitation reactions, agglutination assays (e.g., gel agglutination assays, hemagglutination assays), complement fixation assays, immunofluorescence assays, protein A assays, and immunoelectrophoresis assays, etc. In one embodiment, antibody binding is detected by detecting a label on the primary antibody. In another embodiment, the primary antibody is detected by detecting binding of a secondary antibody or reagent to the primary antibody. In a further embodiment, the secondary antibody is labeled. Many means are known in the art for detecting binding in an immunoassay and are within the scope of the present invention.

[0079] In another embodiment, where a ligand is identified, or the ability of a polypeptide fragment, variant or derivative of the invention to multimerize is being evaluated, binding can be assayed, e.g., by means well-known in the art, such as, for example, reducing and non-reducing gel chromatography, protein affinity chromatography, and affinity blotting. See generally, Phizicky, E., et al., Microbiol. Rev. 59:94-123 (1995). In another embodiment, physiological correlates polypeptide of the present invention binding to its substrates (signal transduction) can be assayed.

[0080] In addition, assays described herein (see Examples) and otherwise known in the art may routinely be applied to measure the ability of polypeptides of the present invention and fragments, variants derivatives and analogs thereof to elicit polypeptide related biological activity (either in vitro or in vivo). Other methods will be known to the skilled artisan and are within the scope of the invention.

Polynucleotides and Polypeptides of the Invention

Features of Protein Encoded by Gene No: 1

[0081] The DNA in this clone is identical to a fragment of a 2 Mbp region of human DNA sequence from cosmid L98A6, Huntington's Disease Region, chromosome 4p16.3.

[0082] This gene is expressed in the following tissues/cDNA libraries: Human Amygdala; KMH2; Spleen, Chronic lymphocytic leukemia.

[0083] Polynucleotides and polypeptides of the invention are useful as reagents for differential identification of the tissue(s) or cell type(s) present in a biological sample and for diagnosis of diseases and conditions which include but are not limited to: leukemia and other cancers. Similarly, polypeptides and antibodies directed to these polypeptides are useful in providing immunological probes for differential identification of the tissue(s) or cell type(s). For a number of disorders of the above tissues or cells, particularly of the immune system, expression of this gene at significantly higher or lower levels may be routinely detected in certain tissues or cell types (e.g., immune, cancerous and wounded tissues) or bodily fluids (e.g., serum, plasma, urine, synovial fluid and spinal fluid) or another tissue or sample taken from an individual having such a disorder, relative to the standard gene expression level, i.e., the expression level in healthy tissue or bodily fluid from an individual not having the disorder.

[0084] This clone encodes a novel secreted protein expressed in several tissues including chronic lymphocytic leukemia. The protein represents a novel therapeutic or target for the above indicated diseases. For example this protein may be a novel cytokine and thus may serve as a therapeutic or target for development of a therapeutic for diseases of the immune system such as allergy, asthma, leukemias, inflammatory diseases, and immune deficiencies. Since this DNA maps to a region associated with Huntington's disease and is expressed in amygdala, this protein may be therapuetic (or a target) for neurological disorders including Huntington's chorea.

Features of Protein Encoded by Gene No: 2

[0085] The computer algorithm BLASTX has been used to determine that the translation product of this gene shares sequence homology with, as a non-limiting example, the sequence accessible through the following database accession no. sp|Q93075|Y218_HUMAN (all information available through the recited accession number is incorporated herein by reference). Based on the structural similarity these homologous polypeptides are expected to share at least some biological activities. Such activities are known in the art, some of which are described elsewhere herein. Assays for determining such activities are also known in the art, some of which have been described elsewhere herein. Preferred polypeptides of the invention comprise a polypeptide having the amino acid sequence set out in the sequence listing as SEQ ID NO: 385.

[0086] This gene is expressed in the following tissues/cDNA libraries: NCI_CGAP_Pr28 and to a lesser extent in Soares adult brain N2b4HB55Y; normalized infant brain cDNA; Nine Week Old Early Stage Human; NCI_CGAP_Kid12; NCI_CGAP_Co16; NCI_CGAP_Kid8; NCI_CGAP_Lu24; Human Adult Skeletal Muscle; Stromal cells 3.88; human corpus colosum; B Cell lymphoma; Soares breast 2NbHBst; Smooth muscle, serum induced, re-exc; Smooth muscle, serum treated; NCI_CGAP_Kid11; NCI_CGAP_GC6; T Cell helper I; Human 8 Week Whole Embryo and Soares fetal liver spleen 1NFLS.

[0087] The tissue distribution indicates polynucleotides and polypeptides corresponding to this gene, as well as antibodies against those polypeptides, may be useful for the diagnosis, prevention, and/or treatment of neurological disorders; particularly brain cancer and neurodegenerative disorders (such as Alzheimer's, Parkinson's and Huntington's Disease). See “Neural Activity and Neurological Diseases” section, infra. The tissue distribution also indicates polynucleotides and polypeptides corresponding to this gene, as well as antibodies against those polypeptides, may be useful for the diagnosis, prevention, and/or treatment of cancer and other hyperproliferative disorders (e.g., see “Hyperproliferative Disorders” section, infra).

Features of Protein Encoded by Gene No: 3

[0088] This gene is expressed in Human Thymus Stromal Cells.

[0089] Polynucleotides and polypeptides corresponding to this gene are useful for diagnosis and treatment of cancer and other proliferative disorders as well as type II diabetes. Accordingly, polynucleotides and/or polypeptides of the invention and/or antagonists thereof (especially neutralizing or antagonistic antibodies) may be used to treat, prevent, and/or ameliorate type II diabetes. Additionally, in other embodiments, the polynucleotides and/or polypeptides corresponding to this gene and/or antagonists thereof (especially neutralizing or antagonistic antibodies) may be used to treat, prevent, or ameliorate conditions associated with type II diabetes mellitus, including, but not limited to, seizures, mental confusion, drowsiness, nonketotic hyperglycemic-hyperosmolar coma, cardiovascular disease (e.g., heart disease, atherosclerosis, microvascular disease, hypertension, stroke, and other diseases and disorders as described in the “Cardiovascular Disorders” section below), dyslipidemia, kidney disease (e.g., renal failure, nephropathy other diseases and disorders as described in the “Renal Disorders” section below), endocrine disorders (as described in the “Endocrine Disorders” section below), obesity, nerve damage, neuropathy, vision impairment (e.g., diabetic retinopathy and blindness), ulcers and impaired wound healing, infections (e.g., infectious diseases and disorders as described in the “Infectious Diseases” section below, especially of the urinary tract and skin), carpal tunnel syndrome and Dupuytren's contracture. In another embodiment, the polynucleotides and/or polypeptides of the invention and/or antagonists thereof (especially neutralizing or antagonistic antibodies) may be used to treat, prevent, and/or ameliorate diabetes and/or complication associated with diabetes. Complications associated with diabetes include: blindness (e.g., due to diabetic retinopathy), kidney disease (e.g., due to diabetic nephropathy), nerve disease (e.g., due to diabetic neuropathy) and amputations, heart disease and stroke, and impotence (e.g., due to diabetic neuropathy or blood vessel blockage. In additional preferred embodiments, polypeptides, polynucleotides, antibodies, agonists, or antagonists corresponding to that polypeptide, may be used to regulate weight gain, weight loss, and/or obesity. In other embodiments, the polynucleotides and/or polypeptides of the invention and/or antagonists thereof (especially neutralizing or antagonistic antibodies) may be used to treat, prevent, and/or ameliorate other diseases or disorders described herein (See, e.g.,. “Biological Activities” section and the sections cross-referenced therein).

[0090] The tissue distribution indicates polynucleotides and polypeptides corresponding to this gene, as well as antibodies against those polypeptides, may be useful for the diagnosis, prevention, and/or treatment of immune system disorders; particularly immune cell proliferative disorders (e.g. leukemia), autoimmune disorders, and immunodeficiencies (including immunodeficiencies caused by genetic factors, microbial pathogens (e.g. HIV), chemotherapy, and radiation). See “Immune Activity” section, infra.

Features of Protein Encoded by Gene No: 4

[0091] This gene is expressed in the following tissues/cDNA libraries: Human Neutrophil, Activated; Human Neutrophils, Activated, re-excision; Human Eosinophils and to a lesser extent in Human Neutrophil; Human Fetal Heart.

[0092] The tissue distribution indicates polynucleotides and polypeptides corresponding to this gene, as well as antibodies against those polypeptides, may be useful for the diagnosis, prevention, and/or treatment of immune system disorders; particularly immune cell proliferative disorders (e.g. leukemia), autoimmune disorders, and immunodeficiencies (including immunodeficiencies caused by genetic factors, microbial pathogens (e.g. HIV), chemotherapy, and radiation). See “Immune Activity” section, infra.

Features of Protein Encoded by Gene No: 5

[0093] The computer algorithm BLASTX has been used to determine that the translation product of this gene shares sequence homology with, as a non-limiting example, the sequence accessible through the following database accession no. pir|D82426|D82426 (all information available through the recited accession number is incorporated herein by reference). Based on the structural similarity these homologous polypeptides are expected to share at least some biological activities. Such activities are known in the art, some of which are described elsewhere herein. Assays for determining such activities are also known in the art, some of which have been described elsewhere herein. Preferred polypeptides of the invention comprise a polypeptide having the amino acid sequence set out in the sequence listing as SEQ ID NO:386.

[0094] This gene is expressed in the following tissues/cDNA libraries: Soares_fetal_liver_spleen_{—}1NFLS_S1 and to a lesser extent in H. Frontal cortex, epileptic, re-excision; stromal cell clone 2.5; Human Primary Breast Cancer; NCI_CGAP_Ut4; NCI_CGAP_Ut2; Hemangiopericytoma; NCI_CGAP_CLL1; NCI_CGAP_Brn25; T-Cell PHA 24 hrs; Soares_fetal^{—}lung_NbHL19W and Soares_NFL_T_GBC_S1.

[0095] The tissue distribution indicates polynucleotides and polypeptides corresponding to this gene, as well as antibodies against those polypeptides, may be useful for the diagnosis, prevention, and/or treatment of cancer and other hyperproliferative disorders (e.g., see “Hyperproliferative Disorders” section, infra).

Features of Protein Encoded by Gene No: 6

[0096] The computer algorithm BLASTX has been used to determine that the translation product of this gene shares sequence homology with, as a non-limiting example, the sequence accessible through the following database accession no. pir|S27956|S27956 (all information available through the recited accession number is incorporated herein by reference). Based on the structural similarity these homologous polypeptides are expected to share at least some biological activities. Such activities are known in the art, some of which are described elsewhere herein. Assays for determining such activities are also known in the art, some of which have been described elsewhere herein. Preferred polypeptides of the invention comprise a polypeptide having the amino acid sequence set out in the sequence listing as SEQ ID NO:387.

[0097] This gene is expressed in the following tissues/cDNA libraries: Soares retina N2b4HR and to a lesser extent in stromal cell clone 2.5; Human Quadriceps; NCI_CGAP_Pr28; Human Testes, Reexcision; NCI_CGAP_Kid3 and Soares_testis_NHT.

[0098] The tissue distribution indicates polynucleotides and polypeptides corresponding to this gene, as well as antibodies against those polypeptides, may be useful for the diagnosis, prevention, and/or treatment of wound healing and disorders of epithelial cell proliferation; particularly chronically open wounds, skin grafting, and cancers of epithelial tissues (e.g. lung and colon cancer). See, e.g., “Wound Healing and Epithelial Cell Proliferation” section, infra. The tissue distribution also indicates polynucleotides and polypeptides corresponding to this gene, as well as antibodies against those polypeptides, may be useful for the diagnosis, prevention, and/or treatment of cancer and other hyperproliferative disorders (e.g., see “Hyperproliferative Disorders” section, infra).

Features of Protein Encoded by Gene No: 7

[0099] The computer algorithm BLASTX has been used to determine that the translation product of this gene shares sequence homology with, as a non-limiting example, the sequence accessible through the following database accession no. sp|AAF73259|AAF73259 (all information available through the recited accession number is incorporated herein by reference) which is described therein as “Putative seven pass transmembrane protein.” Based on the structural similarity these homologous polypeptides are expected to share at least some biological activities. Such activities are known in the art, some of which are described elsewhere herein. Assays for determining such activities are also known in the art, some of which have been described elsewhere herein. Preferred polypeptides of the invention comprise a polypeptide having the amino acid sequence set out in the sequence listing as SEQ ID NO:388.

[0100] This gene is expressed in the following tissues/cDNA libraries: Human adult testis, large inserts and to a lesser extent in Soares_testis_NHT; Soares breast 2NbHBst; Soares_placenta_{—}8 to 9 weeks_{—}2NbHP8 to 9W; Human Adult Testes, Large Inserts, Reexcision; NCI_CGAP_Brn25; NCI_CGAP_Kid3; Soares_NFL_T_GBC_S1; Soares placenta Nb2HP; Soares_NhHMPu_S1; NCI_CGAP_GCB1; Testis 1; NCI_CGAP_Lu19; NCI_CGAP_Co16; NCI_CGAP_Ov23; Hodgkin's Lymphoma I; H. Kidney Cortex, subtracted; Glioblastoma; Human Thymus; Ovarian Tumor Oct. 3, 1995; NCI_CGAP_GC4; Adipocytes; Soares retina N2b4HR; Colon Tumor II; Soares_total_fetus_Nb2HF8_{—}9w; Soares_fetal_liver_spleen_{—}1NFLS_S1; Soares fetal liver spleen 1NFLS; NCI_CGAP_Co21 and NCI_CGAP_Sub5.

[0101] The tissue distribution indicates polynucleotides and polypeptides corresponding to this gene, as well as antibodies against those polypeptides, may be useful for the diagnosis, prevention, and/or treatment of reproductive system disorders; particularly male and female infertility, placental and uterine disorders (e.g. endometriosis), and cancer of reproductive organs (e.g. testicular and ovarian cancer). See “Reproductive System Disorders” section, infra.

Features of Protein Encoded by Gene No: 8

[0102] The computer algorithm BLASTX has been used to determine that the translation product of this gene shares sequence homology with, as a non-limiting example, the sequence accessible through the following database accession no. sp|Q92508|Q92508 (all information available through the recited accession number is incorporated herein by reference) which is described therein as “MYELOBLAST KIAA0233”. Based on the structural similarity these homologous polypeptides are expected to share at least some biological activities. Such activities are known in the art, some of which are described elsewhere herein. Assays for determining such activities are also known in the art, some of which have been described elsewhere herein. Preferred polypeptides of the invention comprise a polypeptide having the amino acid sequence set out in the sequence listing as SEQ ID NO:389.

[0103] This gene is expressed in the following tissues/cDNA libraries: Human Pancreas Tumor, Reexcision; Human Amygdala; Soares infant brain 1NIB.

[0104] The tissue distribution indicates polynucleotides and polypeptides corresponding to this gene, as well as antibodies against those polypeptides, may be useful for the diagnosis, prevention, and/or treatment of endocrine system disorders; particularly diabetes and endocrine organ cancers (e.g. pancreatic cancer). See “Endocrine Disorders” section, infra. The tissue distribution also indicates polynucleotides and polypeptides corresponding to this gene, as well as antibodies against those polypeptides, may be useful for the diagnosis, prevention, and/or treatment of neurological disorders; particularly brain cancer and neurodegenerative disorders (such as Alzheimer's, Parkinson's and Huntington's Disease). See “Neural Activity and Neurological Diseases” section, infra.

Features of Protein Encoded by Gene No: 9

[0105] The computer algorithm BLASTX has been used to determine that the translation product of this gene shares sequence homology with, as a non-limiting example, the sequence accessible through the following database accession no. sp|Q9ULK51Q9ULK5 (all information available through the recited accession number is incorporated herein by reference). Based on the structural similarity these homologous polypeptides are expected to share at least some biological activities. Such activities are known in the art, some of which are described elsewhere herein. Assays for determining such activities are also known in the art, some of which have been described elsewhere herein. Preferred polypeptides of the invention comprise a polypeptide having the amino acid sequence set out in the sequence listing as SEQ ID NO:390.

[0106] This gene is expressed in the following tissues/cDNA libraries: Human Osteoclastoma Stromal Cells—unamplified and to a lesser extent in NCI_CGAP_Lu24; NCI_CGAP_Gas4; NCI_CGAP_Co3; Human Endometrial Tumor; Activated T-cell (12 h)/Thiouridine-re-excision; Soares fetal liver spleen 1NFLS; NCI_CGAP_Kid12; Jurkat T-Cell, S phase; NCI_CGAP_Ut1; NCI_CGAP_Pr28; Human Pancreas Tumor; Human Thymus; NCI_CGAP_Kid11; Human Testes Tumor; NCI_CGAP_GC6; Human Fetal Heart; CD34 positive cells (Cord Blood); Human 8 Week Whole Embryo; Nine Week Old Early Stage Human; Soares_fetal_liver_spleen_{—}1NFLS_S1; Soares_NFL_T_GBC_S1; Soares_testis_NHT and NCI_CGAP_Co19.

[0107] The tissue distribution indicates polynucleotides and polypeptides corresponding to this gene, as well as antibodies against those polypeptides, may be useful for the diagnosis, prevention, and/or treatment of hematopoietic disorders; particularly anemias, clotting disorders/abnormalities (e.g. hemophilia, myocardial infarction, stroke), and leukemia. See “Blood Related Disorders” section, infra. The tissue distribution indicates polynucleotides and polypeptides corresponding to this gene, as well as antibodies against those polypeptides, may be useful for the diagnosis, prevention, and/or treatment of immune system disorders; particularly immune cell proliferative disorders (e.g. leukemia), autoimmune disorders, and immunodeficiencies (including immunodeficiencies caused by genetic factors, microbial pathogens (e.g. HIV), chemotherapy, and radiation). See “Immune Activity” section, infra.

Features of Protein Encoded by Gene No: 10

[0108] This gene is expressed in the following tissues/cDNA libraries: Soares infant brain 1NIB and to a lesser extent in Soares fetal liver spleen 1NFLS; Soares_testis_NHT; Soares_NhHMPu_S1; Early Stage Human Brain; Human Endometrial Tumor; Soares_fetal_lung_NbHL19W; NCI_CGAP_Kid11; Colon Carcinoma; Soares adult brain N2b5HB55Y; H. Frontal cortex, epileptic, re-excision; Soares_pregnant_uterus_NbHPU; Soares_fetal_heart_NbHH19W; NCI_CGAP_GC6; NCI_CGAP_Brn25; Human Amygdala; Human 8 Week Whole Embryo; Pancreas Islet Cell Tumor; Soares_senescent_fibroblasts_NbHSF; Soares_multiple_sclerosis_{—}2NbHMSP; normalized infant brain cDNA; WI 38 cells; Human Manic Depression Tissue; Ovary, Normal: (9805C040R); NCI_CGAP_Pan1; CHME Cell Line, untreated; NCI_CGAP_GC4; Stratagene lung (#937210); NCI_CGAP_Kid5; Colon Tumor II; Soares_total_fetus_Nb2HF8_{—}9w; Soares placenta Nb2HP; NCI_CGAP_Sub3; Human Fetal Brain, normalized A5002F; Human Fetal Brain, normalized C500H; Stratagene corneal stroma (#937222); NCI_CGAP_Lu19; Ovarian Tumor I, OV5232; Human 8 Week Whole Embryo, subtracted; NCI_CGAP_Ov32; NCI_CGAP_GC2; Human Fetal Brain; Jia bone marrow stroma; NCI_CGAP_Br1.1; H. Whole Brain #2, re-excision; Human endometrial stromal cells-treated with estradiol; NCI_CGAP_Co9; Human normal ovary (#9610G215); Glioblastoma; NCI_CGAP_Co14; Human Infant Brain; Stratagene muscle 937209; NCI_CGAP_Pr22; Human T-cell lymphoma, re-excision; Ovary, Cancer: (15799A1F) Poorly differentiated carcinoma; Stratagene pancreas (#937208); NCI_CGAP_Pr28; NCI_CGAP_Gas4; Human Hypothalmus, Schizophrenia; Stratagene endothelial cell 937223; Human Hippocampus; Soares_NSF_F8_{—}9W_OT_PA_P_S1; Human Rhabdomyosarcoma; NCI_CGAP_CLL1; Human Testes Tumor, re-excision; Human Placenta (re-excision); Human adult testis, large inserts; Human endometrial stromal cells-treated with progesterone; NCI_CGAP_Co8; Human Pancreas Tumor, Reexcision; Bone marrow; T-Cell PHA 16 hrs; Soares retina N2b4HR; NCI_CGAP_Brn23; Human Adult Heart, re-excision; Human fetal heart, Lambda ZAP Express; T-Cell PHA 24 hrs; Neutrophils IL-1 and LPS induced; Human Bone Marrow, treated; Soares melanocyte 2NbHM; Nine Week Old Early Stage Human; T cell helper II; Human Cerebellum; Soares_fetal_liver_spleen_{—}1NFLS_S1; NCI_CGAP_GU1; NCI_CGAP_Co19 and NCI_CGAP_Sub6.

[0109] The tissue distribution indicates polynucleotides and polypeptides corresponding to this gene, as well as antibodies against those polypeptides, may be useful for the diagnosis, prevention, and/or treatment of neurological disorders; particularly brain cancer and neurodegenerative disorders (such as Alzheimer's, Parkinson's and Huntington's Disease). See “Neural Activity and Neurological Diseases” section, infra. The tissue distribution also indicates polynucleotides and polypeptides corresponding to this gene, as well as antibodies against those polypeptides, may be useful for the diagnosis, prevention, and/or treatment of cancer and other hyperproliferative disorders (e.g., see “Hyperproliferative Disorders” section, infra).

Features of Protein Encoded by Gene No: 12

[0110] This gene is expressed in Human Thymus Stromal Cells.

[0111] The tissue distribution indicates polynucleotides and polypeptides corresponding to this gene, as well as antibodies against those polypeptides, may be useful for the diagnosis, prevention, and/or treatment of immune system disorders; particularly immune cell proliferative disorders (e.g. leukemia), autoimmune disorders, and immunodeficiencies (including immunodeficiencies caused by genetic factors, microbial pathogens (e.g. HIV), chemotherapy, and radiation). See “Immune Activity” section, infra.

Features of Protein Encoded by Gene No: 13

[0112] The computer algorithm BLASTX has been used to determine that the translation product of this gene shares sequence homology with, as a non-limiting example, the sequence accessible through the following database accession no. sp|BAA91131|BAA91131 (all information available through the recited accession number is incorporated herein by reference). Based on the structural similarity these homologous polypeptides are expected to share at least some biological activities. Such activities are known in the art, some of which are described elsewhere herein. Assays for determining such activities are also known in the art, some of which have been described elsewhere herein. Preferred polypeptides of the invention comprise a polypeptide having the amino acid sequence set out in the sequence listing as SEQ ID NO: 392, SEQ ID NO: 393, SEQ ID NO: 394, SEQ ID NO: 395, and SEQ ID NO: 395.

[0113] This gene is expressed in the following tissues/cDNA libraries: Resting T-Cell Library, II; Human Activated T-Cells, re-excision; Activated T-cell(12 h)/Thiouridine-re-excision; NCI_CGAP_Sub3.

[0114] The tissue distribution indicates polynucleotides and polypeptides corresponding to this gene, as well as antibodies against those polypeptides, may be useful for the diagnosis, prevention, and/or treatment of immune system disorders; particularly immune cell proliferative disorders (e.g. leukemia), autoimmune disorders, and immunodeficiencies (including immunodeficiencies caused by genetic factors, microbial pathogens (e.g. HIV), chemotherapy, and radiation). See “Immune Activity” section, infra.

Features of Protein Encoded by Gene No: 14

[0115] The computer algorithm BLASTX has been used to determine that the translation product of this gene shares sequence homology with, as a non-limiting example, the sequence accessible through the following Genbank protein database accession no. pir|S41408|S41408 (all information available through the recited accession number is incorporated herein by reference) which is described therein as “lysosomal acid lipase (EC 3.1.1.-)/sterol esterase (EC 3.1.1.13) precursor—human. Based on the structural similarity these homologous polypeptides are expected to share at least some biological activities. Such activities are known in the art, some of which are described elsewhere herein. Assays for determining such activities are also known in the art, some of which have been described elsewhere herein. Preferred polypeptides of the invention comprise a polypeptide having the amino acid sequence set out in the sequence listing as SEQ ID NO: 397 and/or SEQ ID NO: 398. The protein encoded by this clone is ˜40% identical to lipase (NP_{—}000226.1) and similarly identical to gastic lipase (NP004181.1).

[0116] This gene is expressed in Healing groin wound—zero hr post-incision (control).

[0117] The tissue distribution indicates polynucleotides and polypeptides corresponding to this gene, as well as antibodies against those polypeptides, may be useful for the diagnosis, prevention, and/or treatment of wound healing and disorders of epithelial cell proliferation; particularly chronically open wounds, skin grafting, and cancers of epithelial tissues (e.g. lung and colon cancer). See “Wound Healing and Epithelial Cell Proliferation” section, infra. The tissue distribution indicates polynucleotides and polypeptides corresponding to this gene, as well as antibodies against those polypeptides, may be useful for the diagnosis, prevention, and/or treatment of diseases of lipid metabolism, cholesterol storage disease, Wolman disease, atherosclerosis, and/or coronary artery disease.

[0118] The protein encoded by this clone is ˜40% identical to lipase A, the lysosomal acid lipase (also known as cholesteyrl ester hydrolase). This enzyme functions in the lysosome to catalyze the hydrolysis of cholesteryl esters and triglycerides. Mutations in LIPA can result in Wolman disease and cholesteryl ester storage disease. Human lysosomal acid lipase (hLAL) is essential for the hydrolysis of cholesteryl esters and triglycerides in the lysosome. Defective hLAL activity leads to two autosomal recessive traits, Wolman disease (WD) or cholesteryl ester storage disease (CESD). Phenotypically, WD has accumulation of both triglycerides and cholesteryl esters, while CESD has mainly elevated cholesteryl esters.

Features of Protein Encoded by Gene No: 15

[0119] The computer algorithm BLASTX has been used to determine that the translation product of this gene shares sequence homology with, as a non-limiting example, the sequence accessible through the following database accession no. sp|BAB01630|BAB01630 (all information available through the recited accession number is incorporated herein by reference) which is described therein as “Unnamed protein product.” Based on the structural similarity these homologous polypeptides are expected to share at least some biological activities. Such activities are known in the art, some of which are described elsewhere herein. Assays for determining such activities are also known in the art, some of which have been described elsewhere herein. Preferred polypeptides of the invention comprise a polypeptide having the amino acid sequence set out in the sequence listing as SEQ ID NO: 399 and/or SEQ ID NO: 400.

[0120] This gene is expressed in Dendritic Cells From CD34 Cells.

[0121] The tissue distribution indicates polynucleotides and polypeptides corresponding to this gene, as well as antibodies against those polypeptides, may be useful for the diagnosis, prevention, and/or treatment of immune system disorders; particularly immune cell proliferative disorders (e.g. leukemia), autoimmune disorders, and immunodeficiencies (including immunodeficiencies caused by genetic factors, microbial pathogens (e.g. HIV), chemotherapy, and radiation). See “Immune Activity” section, infra.

Features of Protein Encoded by Gene No: 16

[0122] This gene is expressed in the following tissues/cDNA libraries: NCI_CGAP_Pr28 and to a lesser extent in Macrophage-oxLDL; Epithelial-TNFa and INF induced; Stratagene colon (#937204); Human Neutrophil, Activated; Human Adult Pulmonary, re-excision; Human Testes; Soares_testis_NHT; Primary Dendritic Cells, lib 1; Macrophage-oxLDL, re-excision; Prostate Adenocarcinoma; NCI_CGAP_Co16; Human Pancreatic Carcinoma; Breast, Cancer: (4004943 A5); Human Neutrophil; NCI_CGAP_Ew1; NCI_CGAP_Pr22; Stratagene fetal retina 937202; NCI_CGAP_Br2; NCI_CGAP_CLL1; Human adult testis, large inserts; Fetal Liver, subtraction II; Rectum tumour; Human Adult Testes, Large Inserts, Reexcision; Rejected Kidney, lib 4; Human blood platelets; CD34 depleted Buffy Coat (Cord Blood), re-excision; NCI_CGAP_Kid5; Monocyte activated; Human Bone Marrow, treated; Soares ovary tumor NbHOT; Dendritic cells, pooled; neutrophils control; Keratinocyte; Colon Tumor II and NCI_CGAP_Sub2.

[0123] The tissue distribution indicates polynucleotides and polypeptides corresponding to this gene, as well as antibodies against those polypeptides, may be useful for the diagnosis, prevention, and/or treatment of immune system disorders; particularly immune cell proliferative disorders (e.g. leukemia), autoimmune disorders, and immunodeficiencies (including immunodeficiencies caused by genetic factors, microbial pathogens (e.g. HIV), chemotherapy, and radiation). See “Immune Activity” section, infra. The tissue distribution also indicates polynucleotides and polypeptides corresponding to this gene, as well as antibodies against those polypeptides, may be useful for the diagnosis, prevention, and/or treatment of cancer and other hyperproliferative disorders (e.g., see “Hyperproliferative Disorders” section, infra).

Features of Protein Encoded by Gene No: 17

[0124] This gene is expressed in Human Stomach, re-excision.

[0125] The tissue distribution indicates polynucleotides and polypeptides corresponding to this gene, as well as antibodies against those polypeptides, may be useful for the diagnosis, prevention, and/or treatment of gastrointestinal system disorders; particularly inflammatory diseases (e.g. gastroenteritis and stomach ulcers) and gastrointestinal cancers (e.g. stomach and colon cancer. See “Gastrointestinal Disorders” section, infra.

Features of Protein Encoded by Gene No: 18

[0126] The computer algorithm BLASTX has been used to determine that the translation product of this gene shares sequence homology with, as a non-limiting example, the sequence accessible through the following database accession no. pir|A26829|ISBOSS (all information available through the recited accession number is incorporated herein by reference) which is described therein as “protein disulfide-isomerase (EC 5.3.4.1) precursor—bovine”. Based on the structural similarity these homologous polypeptides are expected to share at least some biological activities. Such activities are known in the art, some of which are described elsewhere herein. Assays for determining such activities are also known in the art, some of which have been described elsewhere herein. Preferred polypeptides of the invention comprise a polypeptide having the amino acid sequence set out in the sequence listing as SEQ ID NO: 401.

[0127] This gene is expressed in the following tissues/cDNA libraries: Pancreas Tumor PCA4 Tu and to a lesser extent in Ovary, Cancer: (4004562 B6) Papillary Serous Cystic Neoplasm, Low Malignant Pot; Pancreas normal PCA4 No; Soares fetal liver spleen 1NFLS; NCI_CGAP_Ut4; NCI_CGAP_Kid11; Soares_parathyroid_tumor_NbHPA; NCI_CGAP_GCB1; H. Kidney Medulla, subtracted; HPAS (human pancreas, subtracted); NCI_CGAP_Ov23; NCI_CGAP_Thyl; Ovarian Cancer; Breast, Cancer: (4004943 A5); NCI_CGAP_Ut1; Human Pancreas Tumor; NCI_CGAP_CLL1; Palate normal; Human Pancreas Tumor, Reexcision; Soares_fetal_lung_NbHL19W; Soares_fetal_liver_spleen_{—}1NFLS_S1 and Soares_NhHMPu_S1.

[0128] The tissue distribution indicates polynucleotides and polypeptides corresponding to this gene, as well as antibodies against those polypeptides, may be useful for the diagnosis, prevention, and/or treatment of endocrine system disorders; particularly diabetes and endocrine organ cancers (e.g. pancreatic cancer). See, e.g., “Endocrine Disorders” section, infra. The tissue distribution also indicates polynucleotides and polypeptides corresponding to this gene, as well as antibodies against those polypeptides, may be useful for the diagnosis, prevention, and/or treatment of cancer and other hyperproliferative disorders (e.g., see “Hyperproliferative Disorders” section, infra).

Features of Protein Encoded by Gene No: 19

[0129] The computer algorithm BLASTX has been used to determine that the translation product of this gene shares sequence homology with, as a non-limiting example, the sequence accessible through the following Genbank database accession no. pir|T42691|T42691 (all information available through the recited accession number is incorporated herein by reference) which is described therein as “hypothetical protein DKFZp434D2328.1—human (fragment)”. Based on the structural similarity these homologous polypeptides are expected to share at least some biological activities. Such activities are known in the art, some of which are described elsewhere herein. Assays for determining such activities are also known in the art, some of which have been described elsewhere herein. Preferred polypeptides of the invention comprise a polypeptide having the amino acid sequence set out in the sequence listing as SEQ ID NO: 402 and/or SEQ ID NO: 403.

[0130] This gene is expressed in CHME Cell Line, treated 5 hrs.

[0131] Polynucleotides and polypeptides of the invention are useful as reagents for differential identification of the tissue(s) or cell type(s) present in a biological sample and for diagnosis of diseases and conditions which include but are not limited to: Alzheimer's disease. Similarly, polypeptides and antibodies directed to these polypeptides are useful in providing immunological probes for differential identification of the tissue(s) or cell type(s). For a number of disorders of the above tissues or cells, particularly of the nervous system, expression of this gene at significantly higher or lower levels may be routinely detected in certain tissues or cell types (e.g., neuronal, cancerous and wounded tissues) or bodily fluids (e.g., serum, plasma, urine, synovial fluid and spinal fluid) or another tissue or sample taken from an individual having such a disorder, relative to the standard gene expression level, i.e., the expression level in healthy tissue or bodily fluid from an individual not having the disorder.

[0132] The elevated level of expression in microglial cells indicates that the protein product of this clone would be useful for the detection/treatment of neurodegenerative disease states and behavioral disorders such as Alzheimer's Disease, Parkinson's Disease, Huntington's Disease, schizophrenia, mania, dementia, paranoia, obsessive compulsive disorder and panic disorder.

Features of Protein Encoded by Gene No: 20

[0133] This sequence matches UniGene cluster Hs.127376, which maps to chromosome 13.

[0134] This gene is expressed in the following tissues/cDNA libraries: Human Rhabdomyosarcoma; normalized infant brain cDNA; Soares_testis_NHT and to a lesser extent in Soares placenta Nb2HP; NCI_CGAP_Kid11; Soares melanocyte 2NbHM; Soares_NFL_T_GBC_S1; NCI_CGAP_GCB1; Normal Human Trabecular Bone Cells; NCI_CGAP_Br2; Hepatocellular Tumor, re-excision; Palate carcinoma; Soares_NhHMPu_S1; Soares infant brain 1NIB; Larynx carcinoma IV; Stomach Tumour; Thymus; NCI_CGAP_Co16; NCI_CGAP_Kid8; Activated T-cells; NCI_CGAP_Ut4; B Cell lymphoma; wilm's tumor; HEL cell line; NCI_CGAP_Ut2; Human Adult Small Intestine; NCI_CGAP_Ut1; NCI_CGAP_Pr22; Epithelial-TNFa and INF induced; Rejected Kidney, lib 4; Ovary, Cancer (9809C332): Poorly differentiated adenocarcinoma; Normal colon; NCI_CGAP_GC6; Pancreas Islet Cell Tumor; NCI_CGAP_Kid3; Soares_multiple_sclerosis_{—}2NbHMSP; Dendritic cells, pooled; Colon Tumor II; Soares_pregnant_uterus_NbHPU and NCI_CGAP_Sub4.

[0135] The tissue distribution indicates polynucleotides and polypeptides corresponding to this gene, as well as antibodies against those polypeptides, may be useful for the diagnosis, prevention, and/or treatment of neurological disorders; particularly brain cancer and neurodegenerative disorders (such as Alzheimer's, Parkinson's and Huntington's Disease). See “Neural Activity and Neurological Diseases” section, infra. The tissue distribution also indicates polynucleotides and polypeptides corresponding to this gene, as well as antibodies against those polypeptides, may be useful for the diagnosis, prevention, and/or treatment of cancer and other hyperproliferative disorders (e.g., see “Hyperproliferative Disorders” section, infra).

Features of Protein Encoded by Gene No: 21

[0136] This gene is expressed in the following tissues/cDNA libraries: Pancreas Islet Cell Tumor; Soares parathyroid_tumor_NbHPA and to a lesser extent in NCI_CGAP_Brn52; NCI_CGAP_Ut3; Human Soleus; Stratagene muscle 937209; Palate normal; Human Adult Heart, re-excision; NTERA2 teratocarcinoma cell line+retinoic acid (14 days) and Soares_NhHMPu_S1.

[0137] The tissue distribution indicates polynucleotides and polypeptides corresponding to this gene, as well as antibodies against those polypeptides, may be useful for the diagnosis, prevention, and/or treatment of endocrine system disorders; particularly diabetes and endocrine organ cancers (e.g. pancreatic cancer). See “Endocrine Disorders” section, infra. The tissue distribution also indicates polynucleotides and polypeptides corresponding to this gene, as well as antibodies against those polypeptides, may be useful for the diagnosis, prevention, and/or treatment of cancer and other hyperproliferative disorders (e.g., see “Hyperproliferative Disorders” section, infra).

Features of Protein Encoded by Gene No: 22

[0138] The computer algorithm BLASTX has been used to determine that the translation product of this gene shares sequence homology with, as a non-limiting example, the sequence accessible through the following database accession no. sp|BAA95033|BAA95033 (all information available through the recited accession number is incorporated herein by reference) which is described therein as “Brain cDNA, clone MNCb-3816, similar to AF171875 g1-related zinc finger protein (Mus musculus).” Based on the structural similarity these homologous polypeptides are expected to share at least some biological activities. Such activities are known in the art, some of which are described elsewhere herein. Assays for determining such activities are also known in the art, some of which have been described elsewhere herein. Preferred polypeptides of the invention comprise a polypeptide having the amino acid sequence set out in the sequence listing as SEQ ID NO:404.

[0139] This gene is expressed in the following tissues/cDNA libraries: NCI_CGAP_Co11; Soares placenta Nb2HP and to a lesser extent in Human fetal brain (TFujiwara); Hepatocellular Tumor; NCI_CGAP_Co14; Clontech human aorta polyA+ mRNA (#6572); Stratagene liver (#937224); NCI_CGAP_Pan1; NCI_CGAP_Kid11; Colon Normal II; Soares fetal liver spleen 1NFLS; Human adult small intestine, re-excision; Hepatocellular Tumor, re-excision; Human Colon Cancer, re-excision; Human Stomach, re-excision; Human Osteoclastoma, re-excision; Morton Fetal Cochlea; Stratagene pancreas (#937208); Liver, Hepatoma; Liver Tumour Met 5 Tu; Hepatocellular Tumor, re-excision; Human Placenta (re-excision); Human Liver, normal; 12 Week Old Early Stage Human; Colon Tumor; Rectum tumour; Stomach Normal; Human Pancreas Tumor, Reexcision; Human Endometrial Tumor and NCI_CGAP_GU1.

[0140] The tissue distribution indicates polynucleotides and polypeptides corresponding to this gene, as well as antibodies against those polypeptides, may be useful for the diagnosis, prevention, and/or treatment of cancer and other hyperproliferative disorders (e.g., see “Hyperproliferative Disorders” section, infra). The tissue distribution indicates polynucleotides and polypeptides corresponding to this gene, as well as antibodies against those polypeptides, may be useful for the diagnosis, prevention, and/or treatment of neurological disorders; particularly brain cancer and neurodegenerative disorders (such as Alzheimer's, Parkinson's and Huntington's Disease). See “Neural Activity and Neurological Diseases” section, infra. Furthermore, the tissue distribution indicates polynucleotides and polypeptides corresponding to this gene would be useful for the diagnosis, prevention, and or treatment of liver disorders and cancers. For example, the protein can be used for the detection, treatment, and/or prevention of Wilson's disease, cirrhosis, fibrosis, bilirubin metabolism, hepatomegaly, cholestasis, liver cancer (for example, hepatoblastoma), jaundice, hepatitis (acuta and chronic) and liver metabolic diseases and conditions attributable to the differentiation of hepatocyte progenitor cells.

Features of Protein Encoded by Gene No: 23

[0141] This gene is expressed in Colon Normal.

[0142] The tissue distribution indicates polynucleotides and polypeptides corresponding to this gene, as well as antibodies against those polypeptides, may be useful for the diagnosis, prevention, and/or treatment of gastrointestinal system disorders; particularly inflammatory diseases (e.g. gastroenteritis and stomach ulcers) and gastrointestinal cancers (e.g. stomach and colon cancer. See “Gastrointestinal Disorders” section, infra.

Features of Protein Encoded by Gene No: 24

[0143] This gene is expressed most predominantly in fetal heart. It is also expressed in hemangiopericytoma, a neoplasm derived from pericytes, the cells normally arranged along capillaries and venuels. Other tissues expressing this cDNA include: NCI_CGAP_Pr28; NCI_CGAP_Brn35; NCI_CGAP_Ov23; Frontal lobe, dementia; re-excision; CD34 positive cells (cord blood), re-ex; NCI_CGAP_Ut2; Adipose tissue (diabetic type II)#41689; NCI_CGAP_Pr1; NCI_CGAP_Ut1; Healing groin wound—zero hr post-incision (control); Human Fetal Dura Mater; Human T-Cell Lymphoma; Palate carcinoma; NCI_CGAP_GC4; Rejected Kidney, lib 4; NCI_CGAP_GC6; Human Fetal Lung III; T-Cell PHA 16 hrs; Soares_placenta_{—}8 to 9 weeks_{—}2NbHP8 to 9W; Colon Normal; NCI_CGAP_Lu5; Soares_fetal_lung_NbHL19W; Soares_total_fetus_Nb2HF8_{—}9w; Soares_pregnant_uterus_NbHPU; Soares_NhHMPu_S1; NCI_CGAP_GCB1; NCI_CGAP_GU1; NCI_CGAP_Brn53.

[0144] The tissue distribution indicates that polynucleotides and polypeptides corresponding to this gene are useful for diagnosis and treatment of cancer and other proliferative disorders as well as type II diabetes. Accordingly, polynucleotides and/or polypeptides of the invention and/or antagonists thereof (especially neutralizing or antagonistic antibodies) may be used to treat, prevent, and/or ameliorate type II diabetes. Additionally, in other embodiments, the polynucleotides and/or polypeptides corresponding to this gene and/or antagonists thereof (especially neutralizing or antagonistic antibodies) may be used to treat, prevent, or ameliorate conditions associated with type II diabetes mellitus, including, but not limited to, seizures, mental confusion, drowsiness, nonketotic hyperglycemic-hyperosmolar coma, cardiovascular disease (e.g., heart disease, atherosclerosis, microvascular disease, hypertension, stroke, and other diseases and disorders as described in the “Cardiovascular Disorders” section below), dyslipidemia, kidney disease (e.g., renal failure, nephropathy other diseases and disorders as described in the “Renal Disorders” section below), endocrine disorders (as described in the “Endocrine Disorders” section below), obesity, nerve damage, neuropathy, vision impairment (e.g., diabetic retinopathy and blindness), ulcers and impaired wound healing, infections (e.g., infectious diseases and disorders as described in the “Infectious Diseases” section below, especially of the urinary tract and skin), carpal tunnel syndrome and Dupuytren's contracture. In another embodiment, the polynucleotides and/or polypeptides of the invention and/or antagonists thereof (especially neutralizing or antagonistic antibodies) may be used to treat, prevent, and/or ameliorate diabetes and/or complication associated with diabetes. Complications associated with diabetes include: blindness (e.g., due to diabetic retinopathy), kidney disease (e.g., due to diabetic nephropathy), nerve disease (e.g., due to diabetic neuropathy) and amputations, heart disease and stroke, and impotence (e.g., due to diabetic neuropathy or blood vessel blockage. In additional preferred embodiments, polypeptides, polynucleotides, antibodies, agonists, or antagonists corresponding to that polypeptide, may be used to regulate weight gain, weight loss, and/or obesity. In other embodiments, the polynucleotides and/or polypeptides of the invention and/or antagonists thereof (especially neutralizing or antagonistic antibodies) may be used to treat, prevent, and/or ameliorate other diseases or disorders described herein (See, e.g.,. “Biological Activities” section and the sections cross-referenced therein).

[0145] The tissue distribution indicates polynucleotides and polypeptides corresponding to this gene, as well as antibodies against those polypeptides, may be useful for the diagnosis, prevention, and/or treatment of wound healing and disorders of epithelial cell proliferation; particularly chronically open wounds, skin grafting, and cancers of epithelial tissues (e.g. lung and colon cancer). See “Wound Healing and Epithelial Cell Proliferation” section, infra.

[0146] The tissue distribution indicates polynucleotides and polypeptides corresponding to this gene, as well as antibodies against those polypeptides, may be useful for the diagnosis, prevention, and/or treatment of heart disease as well as other diseases of the vasculature. This factor (or antibodies raised against it) may be useful as a anti- or pro-angiogenic therapeutics for such diseases as cancer, ischemia, stroke, and cardiovascular disease.

[0147] This cDNA is expressed in highly vascularized tissues (fetal heart, hemangiopericytoma, brain, healing wound, and numerous tumor types). This tissue distribution is suggestive of a factor involved in angiogenesis.

Features of Protein Encoded by Gene No: 25

[0148] This gene is expressed in the following tissues/cDNA libraries: Human Testes Tumor and to a lesser extent in Human Whole Brain #2—Oligo dT>1.5 Kb; HEL cell line; Stratagene NT2 neuronal precursor 937230; Human Adrenal Gland Tumor; Human Testes Tumor, re-excision; Myoloid Progenitor Cell Line; Human Bone Marrow, treated; NTERA2 teratocarcinoma cell line+retinoic acid (14 days); Human 8 Week Whole Embryo; Activated T-cell(12 h)/Thiouridine-re-excision; NCI_CGAP_GCB1 and Primary Dendritic Cells, lib 1.

[0149] The tissue distribution indicates polynucleotides and polypeptides corresponding to this gene, as well as antibodies against those polypeptides, may be useful for the diagnosis, prevention, and/or treatment of reproductive system disorders; particularly male and female infertility, placental and uterine disorders (e.g. endometriosis), and cancer of reproductive organs (e.g. testicular and ovarian cancer). See “Reproductive System Disorders” section, infra. The tissue distribution also indicates polynucleotides and polypeptides corresponding to this gene, as well as antibodies against those polypeptides, may be useful for the diagnosis, prevention, and/or treatment of neurological disorders; particularly brain cancer and neurodegenerative disorders (such as Alzheimer's, Parkinson's and Huntington's Disease). See “Neural Activity and Neurological Diseases” section, infra. Moreover, the tissue distribution also indicates polynucleotides and polypeptides corresponding to this gene, as well as antibodies against those polypeptides, may be useful for the diagnosis, prevention, and/or treatment of cancer and other hyperproliferative disorders (e.g., see “Hyperproliferative Disorders” section, infra).

Features of Protein Encoded by Gene No: 26

[0150] This gene is expressed in Human T-cell lymphoma, re-excision.

[0151] The tissue distribution indicates polynucleotides and polypeptides corresponding to this gene, as well as antibodies against those polypeptides, may be useful for the diagnosis, prevention, and/or treatment of immune system disorders; particularly immune cell proliferative disorders (e.g. leukemia), autoimmune disorders, and immunodeficiencies (including immunodeficiencies caused by genetic factors, microbial pathogens (e.g. HIV), chemotherapy, and radiation). See “Immune Activity” section, infra.

Features of Protein Encoded by Gene No: 27

[0152] The computer algorithm BLASTX has been used to determine that the translation product of this gene shares sequence homology with, as a non-limiting example, the sequence accessible through the following database accession no. sp|BAA95074|BAA95074 (all information available through the recited accession number is incorporated herein by reference) which is described therein as “Brain cDNA, clone MNCb-2717.” Based on the structural similarity these homologous polypeptides are expected to share at least some biological activities. Such activities are known in the art, some of which are described elsewhere herein. Assays for determining such activities are also known in the art, some of which have been described elsewhere herein. Preferred polypeptides of the invention comprise a polypeptide having the amino acid sequence set out in the sequence listing as SEQ ID NO: 407.

[0153] This gene is expressed in the following tissues/cDNA libraries: CHME Cell Line, treated 5 hrs; NTERA2 teratocarcinoma cell line+retinoic acid (14 days).

[0154] The protein homology indicates polynucleotides and polypeptides corresponding to this gene, as well as antibodies against those polypeptides, may be useful for the diagnosis, prevention, and/or treatment of neurological disorders; particularly brain cancer and neurodegenerative disorders (such as Alzheimer's, Parkinson's and Huntington's Disease). See “Neural Activity and Neurological Diseases” section, infra. The tissue distribution indicates polynucleotides and polypeptides corresponding to this gene, as well as antibodies against those polypeptides, may be useful for the diagnosis, prevention, and/or treatment of cancer and other hyperproliferative disorders (e.g., see “Hyperproliferative Disorders” section, infra).

Features of Protein Encoded by Gene No: 28

[0155] The computer algorithm BLASTX has been used to determine that the translation product of this gene shares sequence homology with, as a non-limiting example, the sequence accessible through the following database accession no. sp|BAA91877|BAA91877 (all information available through the recited accession number is incorporated herein by reference). Based on the structural similarity these homologous polypeptides are expected to share at least some biological activities. Such activities are known in the art, some of which are described elsewhere herein. Assays for determining such activities are also known in the art, some of which have been described elsewhere herein. Preferred polypeptides of the invention comprise a polypeptide having the amino acid sequence set out in the sequence listing as SEQ ID NO: 408.

[0156] This gene is expressed in the following tissues/cDNA libraries: Soares infant brain 1NIB and to a lesser extent in Soares_NhHMPu_S1; Soares_total_fetus_Nb2HF8_{—}9w; Soares_fetal_liver_spleen_{—}1NFLS_S1; Ovary, Cancer (4004650 A3): Well-Differentiated Micropapillary Serous Carcinoma; NCI_CGAP_Lu5; normalized infant brain cDNA; Colon Tumor II; NCI_CGAP_Pr28; NCI_CGAP_Gas4; NCI_CGAP_Kid11; Pancreas normal PCA4 No; 12 Week Early Stage Human II, Reexcision; Soares_testis_NHT; Synovial IL-1/TNF stimulated; Synovial hypoxia; NCI_CGAP_Ut1; Human Placenta (re-excision); Human Ovary; Palate carcinoma; Stomach Normal; Stratagene lung (#937210); Prostate Adenocarcinoma; Soares ovary tumor NbHOT; NCI_CGAP_GCB1; Human adult lung 3′ directed MboI cDNA; NK Cells (NKYao20 Control); Pharynx carcinoma; human colon cancer; Smooth muscle, control, re-excision; STRATAGENE Human skeletal muscle cDNA library, cat. #936215; NCI_CGAP_Ut3; NCI_CGAP_AA1; Ovarian cancer, Serous Papillary Adenocarcinoma; Human Ovarian Cancer (#9807G017); Hepatocellular Tumor; Ku 812F Basophils Line; Ovarian cancer, Serous Papillary Adenocarcinoma; Salivary Gland, Lib 2; Ovarian Cancer, # 9702G001; Synovial Fibroblasts (Il1/TNF), subt; H. Meningima, M1; Breast, Cancer: (4004943 A5); Stratagene lung carcinoma 937218; Spinal Cord, re-excision; Monocyte activated, re-excision; Human Umbilical Vein Endothelial Cells, uninduced; Human Fetal Dura Mater; Ovary, Normal: (9805C040R); Ovary, Cancer (15395A1F): Grade II Papillary Carcinoma; Soares breast 2NbHBst; Human Adipose; NCI_CGAP_Pan1; Liver Normal Met5No; Ovary, Cancer: (4004576 A8); Colon, normal; Rectum tumour; Human Testes Tumor; Normal colon; NCI_CGAP_GC6; Human Ovarian Cancer Reexcision; Human Osteoclastoma; NCI_CGAP_Kid3; Monocyte activated; HUMAN B CELL LYMPHOMA; Spleen, Chronic lymphocytic leukemia; Bone Marrow Cell Line (RS4,11); Human Testes; Dendritic cells, pooled; NTERA2 teratocarcinoma cell line+retinoic acid (14 days); Soares_parathyroid_tumor_NbHPA; Soares melanocyte 2NbHM; Nine Week Old Early Stage Human; Soares_fetal_lung_NbHL19W; T cell helper II; Soares_NFL_T_GBC_S1; Soares placenta Nb2HP; Primary Dendritic Cells, lib 1; NCI_CGAP_Sub6; NCI_CGAP_Brn53 and NCI_CGAP_Kid13.

[0157] The tissue distribution indicates polynucleotides and polypeptides corresponding to this gene, as well as antibodies against those polypeptides, may be useful for the diagnosis, prevention, and/or treatment of neurological disorders; particularly brain cancer and neurodegenerative disorders (such as Alzheimer's, Parkinson's and Huntington's Disease). See “Neural Activity and Neurological Diseases” section, infra. The tissue distribution also indicates polynucleotides and polypeptides corresponding to this gene, as well as antibodies against those polypeptides, may be useful for the diagnosis, prevention, and/or treatment of cancer and other hyperproliferative disorders (e.g., see “Hyperproliferative Disorders” section, infra).

Features of Protein Encoded by Gene No: 29

[0158] This gene is expressed in Human Ovarian Cancer Reexcision.

[0159] The tissue distribution indicates polynucleotides and polypeptides corresponding to this gene, as well as antibodies against those polypeptides, may be useful for the diagnosis, prevention, and/or treatment of reproductive system disorders; particularly male and female infertility, placental and uterine disorders (e.g. endometriosis), and cancer of reproductive organs (e.g. testicular and ovarian cancer). See “Reproductive System Disorders” section, infra. The tissue distribution also indicates polynucleotides and polypeptides corresponding to this gene, as well as antibodies against those polypeptides, may be useful for the diagnosis, prevention, and/or treatment of cancer and other hyperproliferative disorders (e.g., see “Hyperproliferative Disorders” section, infra).

Features of Protein Encoded by Gene No: 30

[0160] This gene is expressed in PC3 Prostate cell line.

[0161] The tissue distribution indicates polynucleotides and polypeptides corresponding to this gene, as well as antibodies against those polypeptides, may be useful for the diagnosis, prevention, and/or treatment of reproductive system disorders; particularly male and female infertility, placental and uterine disorders (e.g. endometriosis), and cancer of reproductive organs (e.g. testicular and ovarian cancer). See “Reproductive System Disorders” section, infra.

Features of Protein Encoded by Gene No: 31

[0162] This gene is expressed in the following tissues/cDNA libraries: Human Adrenal Gland Tumor; Prostate Adenocarcinoma.

[0163] The tissue distribution indicates polynucleotides and polypeptides corresponding to this gene, as well as antibodies against those polypeptides, may be useful for the diagnosis, prevention, and/or treatment of endocrine system disorders; particularly diabetes and endocrine organ cancers (e.g. pancreatic cancer). See “Endocrine Disorders” section, infra. The tissue distribution indicates polynucleotides and polypeptides corresponding to this gene, as well as antibodies against those polypeptides, may be useful for the diagnosis, prevention, and/or treatment of cancer and other hyperproliferative disorders (e.g., see “Hyperproliferative Disorders” section, infra).

Features of Protein Encoded by Gene No: 32

[0164] The computer algorithm BLASTX has been used to determine that the translation product of this gene shares sequence homology with, as a non-limiting example, the sequence accessible through the following database accession no. sp|Q9VFG71Q9VFG7 (all information available through the recited accession number is incorporated herein by reference) which is described therein as “CG7530 PROTEIN.” Based on the structural similarity these homologous polypeptides are expected to share at least some biological activities. Such activities are known in the art, some of which are described elsewhere herein. Assays for determining such activities are also known in the art, some of which have been described elsewhere herein.

[0165] Preferred polypeptides of the invention comprise a polypeptide having the amino acid sequence set out in the sequence listing as SEQ ID NO:409.

[0166] This gene is expressed in Human Testes, Reexcision.

[0167] The tissue distribution indicates polynucleotides and polypeptides corresponding to this gene, as well as antibodies against those polypeptides, may be useful for the diagnosis, prevention, and/or treatment of reproductive system disorders; particularly male and female infertility, placental and uterine disorders (e.g. endometriosis), and cancer of reproductive organs (e.g. testicular and ovarian cancer). See “Reproductive System Disorders” section, infra.

Features of Protein Encoded by Gene No: 33

[0168] This gene is expressed in the following tissues/cDNA libraries: Human Testes Tumor and to a lesser extent in NCI_CGAP_Co14; Activated T-cell(12 h)/Thiouridine-re-excision; Soares_testis_NHT; Human adult testis, large inserts; Human Adult Testes, Large Inserts, Reexcision; NCI_CGAP_GC6; Activated T-Cell (12 hs)/Thiouridine labelledEco; Human Endometrial Tumor; Soares infant brain 1NIB; Human Chronic Synovitis; NCI_CGAP_Pr28; NCI_CGAP_Co3; Human Pancreas Tumor, Reexcision; Adipocytes; Soares ovary tumor NbHOT; T Cell helper I; NCI_CGAP_Lu5; Keratinocyte; NCI_CGAP_Lu19; Testes; NCI_CGAP_Br3; Whole 6 Week Old Embryo; NCI_CGAP_Eso2; Human Colon, subtraction; Human Fetal Spleen; Human Liver; NCI_CGAP_Ut4; Lung, Cancer (4005313 A3): Invasive Poorly Differentiated Lung Adenocarcinoma; Human Synovium; Ovarian Cancer, # 9702G001; Human Whole Brain #2—Oligo dT>1.5 Kb; Stratagene neuroepithelium (#937231); TF-1 Cell Line GM-CSF Treated; Human Fetal Kidney; H. Epididiymus, cauda; Ovary, Cancer: (15799A1F) Poorly differentiated carcinoma; Human Pancreas Tumor; Human Adrenal Gland Tumor; Human Whole Six Week Old Embryo; NCI_CGAP_Pan1; Ovary, Cancer: (4004576 A8); Palate normal; Human T-Cell Lymphoma; Ovarian Tumor Oct. 3, 1995; NCI_CGAP_Kid11; Colon Carcinoma; NCI_CGAP_GC4; Ovary, Cancer (9809C332): Poorly differentiated adenocarcinoma; T-Cell PHA 16 hrs; Soares_senescent_fibroblasts_NbHSF; Human Thymus Stromal Cells; Human Bone Marrow, treated; Bone Marrow Cell Line (RS4,11); Soares_parathyroid_tumor_NbHPA; Soares_fetal_lung_NbHL19W; Colon Tumor II; Soares_pregnant_uterus_NbHPU; NCI_CGAP_Br18; NCI_CGAP_CML1 and NCI_CGAP_Sub3.

[0169] The tissue distribution indicates polynucleotides and polypeptides corresponding to this gene, as well as antibodies against those polypeptides, may be useful for the diagnosis, prevention, and/or treatment of reproductive system disorders; particularly male and female infertility, placental and uterine disorders (e.g. endometriosis), and cancer of reproductive organs (e.g. testicular and ovarian cancer). See “Reproductive System Disorders” section, infra.

Features of Protein Encoded by Gene No: 34

[0170] This gene is expressed in the following tissues/cDNA libraries: Human Adult Testes, Large Inserts, Reexcision; Human adult testis, large inserts.

[0171] The tissue distribution indicates polynucleotides and polypeptides corresponding to this gene, as well as antibodies against those polypeptides, may be useful for the diagnosis, prevention, and/or treatment of reproductive system disorders; particularly male infertility and cancer of reproductive organs (e.g. testicular cancer). See “Reproductive System Disorders” section, infra.

Features of Protein Encoded by Gene No: 35

[0172] This gene is expressed in human tonsils.

[0173] The tissue distribution indicates polynucleotides and polypeptides corresponding to this gene, as well as antibodies against those polypeptides, may be useful for the diagnosis, prevention, and/or treatment of immune system disorders; particularly immune cell proliferative disorders (e.g. leukemia), autoimmune disorders, and immunodeficiencies (including immunodeficiencies caused by genetic factors, microbial pathogens (e.g. HIV), chemotherapy, and radiation). See “Immune Activity” section, infra.

Features of Protein Encoded by Gene No: 36

[0174] This gene is expressed in the following tissues/cDNA libraries: Human Activated T-Cells, re-excision; Human Pancreas Tumor, Reexcision.

[0175] The tissue distribution indicates polynucleotides and polypeptides corresponding to this gene, as well as antibodies against those polypeptides, may be useful for the diagnosis, prevention, and/or treatment of immune system disorders; particularly immune cell proliferative disorders (e.g. leukemia), autoimmune disorders, and immunodeficiencies (including immunodeficiencies caused by genetic factors, microbial pathogens (e.g. HIV), chemotherapy, and radiation). See “Immune Activity” section, infra. The tissue distribution also indicates polynucleotides and polypeptides corresponding to this gene, as well as antibodies against those polypeptides, may be useful for the diagnosis, prevention, and/or treatment of endocrine system disorders; particularly diabetes and endocrine organ cancers (e.g. pancreatic cancer). See “Endocrine Disorders” section, infra.

Features of Protein Encoded by Gene No: 37

[0176] The computer algorithm BLASTX has been used to determine that the translation product of this gene shares sequence homology with, as a non-limiting example, the sequence accessible through the following Genbank database accession no. sp|Q9Z0T1|Q9Z0T1 (all information available through the recited accession number is incorporated herein by reference) which is described therein as “HYPOTHETICAL 18.9 KDA PROTEIN (FRAGMENT).” Based on the structural similarity these homologous polypeptides are expected to share at least some biological activities. Such activities are known in the art, some of which are described elsewhere herein. Assays for determining such activities are also known in the art, some of which have been described elsewhere herein. Preferred polypeptides of the invention comprise a polypeptide having the amino acid sequence set out in the sequence listing as SEQ ID NO:410.

[0177] This gene is expressed in the following tissues/cDNA libraries: NCI_CGAP_Gas4 and to a lesser extent in Smooth muscle, serum treated; Soares_pregnant_uterus_NbHPU; Soares placenta Nb2HP; NCI_CGAP_Pan1; Primary Dendritic Cells, lib 1; Smooth muscle, serum induced, re-exc; Soares_placenta_{—}8 to 9 weeks_{—}2NbHP8 to 9W; Hodgkin's Lymphoma II; Soares fetal liver spleen 1NFLS; Human Adipose Tissue, re-excision; NCI_CGAP_Kid3; Smooth muscle, control; Soares_NFL_T_GBC_S1; Human Pituitary, subtracted; H. Kidney Cortex, subtracted; H. Epididiymus, cauda; Soares breast 2NbHBst; Human Whole Six Week Old Embryo; NCI_CGAP_Kid5; Colon Tumor II; NCI_CGAP_Lu28; Human osteoarthritic, fraction II; Liver HepG2 cell line; Lung, Normal: (4005313 B1); NCI_CGAP_Kid8; Hepatocellular Tumor; Synovial hypoxia-RSF subtracted; Human Chronic Synovitis; NCI_CGAP_Ut1; LPS activated derived dendritic cells; Ovary, Normal: (9805C040R); Stratagene endothelial cell 937223; L428; Human Ovary; Human Gall Bladder; Soares breast 3NbHBst; NCI_CGAP_GC4; Human Pancreas Tumor, Reexcision; Human Synovial Sarcoma; Human Placenta; Pancreas normal PCA4 No; NCI_CGAP_Brn23; Human Placenta; HUMAN B CELL LYMPHOMA; NCI_CGAP_Lu5; H. Frontal cortex, epileptic, re-excision; Soares melanocyte 2NbHM; Soares_testis_NHT; Human Pituitary, subtracted V; NCI_CGAP_Mel3; Human Pituitary; Bone marrow stroma, treated; NCI_CGAP_Lu19; Human fetal lung; NCI_CGAP_Eso2; Human White Adipose; Hep G2 Cells, PCR library; Pancreatic Islet; Human Pancreatic Carcinoma; HUMAN STOMACH; Frontal lobe, dementia, re-excision; Human Fetal Bone; Amniotic Cells—TNF induced; Early Stage Human Lung, subtracted; Human Lung; Lung, Cancer (4005163 B7): Invasive, Poorly Diff. Adenocarcinoma, Metastatic; Smooth Muscle—HASTE normalized; Human Normal Breast; NCI_CGAP_S1; Human Synovium; Human Umbilical Vein, Endo. remake; Ovarian cancer, Serous Papillary Adenocarcinoma; Synovial Fibroblasts (Il1/TNF), subt; Synovial hypoxia; Human Pituitary, subt IX; NCI_CGAP_Ut2; HM1; Human Pancreas Tumor; Human Dermal Endothelial Cells, untreated; CD40 activated monocyte dendridic cells; Human Adipose; Stratagene liver (#937224); NCI_CGAP_Co3; Human Placenta (re-excision); 12 Week Old Early Stage Human; NCI_CGAP_Kid11; Adipocytes; Human Fetal Lung III; Endothelial-induced; Primary Dendritic cells, frac 2; NCI_CGAP_Brn25; Osteoblasts; Soares_parathyroid_tumor_NbHPA; Soares_total_fetus_Nb2HF8_{—}9w; Soares_fetal_liver_spleen_{—}1NFLS_S1 and NCI_CGAP_Sub3.

[0178] The tissue distribution indicates polynucleotides and polypeptides corresponding to this gene, as well as antibodies against those polypeptides, may be useful for the diagnosis, prevention, and/or treatment of cancer and other hyperproliferative disorders (e.g., see “Hyperproliferative Disorders” section, infra).

Features of Protein Encoded by Gene No: 38

[0179] This gene is expressed in T cell helper II.

[0180] The tissue distribution indicates polynucleotides and polypeptides corresponding to this gene, as well as antibodies against those polypeptides, may be useful for the diagnosis, prevention, and/or treatment of immune system disorders; particularly immune cell proliferative disorders (e.g. leukemia), autoimmune disorders, and immunodeficiencies (including immunodeficiencies caused by genetic factors, microbial pathogens (e.g. HIV), chemotherapy, and radiation). See “Immune Activity” section, infra.

Features of Protein Encoded by Gene No: 39

[0181] This gene is expressed in Ovarian Tumor Oct. 3, 1995.

[0182] The tissue distribution indicates polynucleotides and polypeptides corresponding to this gene, as well as antibodies against those polypeptides, may be useful for the diagnosis, prevention, and/or treatment of reproductive system disorders; particularly male and female infertility, placental and uterine disorders (e.g. endometriosis), and cancer of reproductive organs (e.g. testicular and ovarian cancer). See “Reproductive System Disorders” section, infra. The tissue distribution also indicates polynucleotides and polypeptides corresponding to this gene, as well as antibodies against those polypeptides, may be useful for the diagnosis, prevention, and/or treatment of cancer and other hyperproliferative disorders (e.g., see “Hyperproliferative Disorders” section, infra).

Features of Protein Encoded by Gene No: 40

[0183] The computer algorithm BLASTX has been used to determine that the translation product of this gene shares sequence homology with, as a non-limiting example, the sequence accessible through the following database accession no. sp|BAB01630|BAB01630 (all information available through the recited accession number is incorporated herein by reference). Based on the structural similarity these homologous polypeptides are expected to share at least some biological activities. Such activities are known in the art, some of which are described elsewhere herein. Assays for determining such activities are also known in the art, some of which have been described elsewhere herein. Preferred polypeptides of the invention comprise a polypeptide having the amino acid sequence set out in the sequence listing as SEQ ID NO:411.

[0184] This gene is expressed in PC3 Prostate cell line.

[0185] The tissue distribution indicates polynucleotides and polypeptides corresponding to this gene, as well as antibodies against those polypeptides, may be useful for the diagnosis, prevention, and/or treatment of reproductive system disorders; particularly male and female infertility, placental and uterine disorders (e.g. endometriosis), and cancer of reproductive organs (e.g. testicular and ovarian cancer). See “Reproductive System Disorders” section, infra.

Features of Protein Encoded by Gene No: 41

[0186] Preferred polypeptides of the invention comprise a polypeptide having the amino acid sequence set out in the sequence listing as SEQ ID NO: 412 and/or SEQ ID NO: 413.

[0187] This gene is expressed in the following tissues/cDNA libraries: TF-1 Cell Line GM-CSF Treated; 12 Week Early Stage Human II, Reexcision; Soares_placenta_{—}8 to 9 weeks_{—}2NbHP8 to 9W; Soares fetal liver spleen 1NFLS.

[0188] The tissue distribution indicates polynucleotides and polypeptides corresponding to this gene, as well as antibodies against those polypeptides, may be useful for the diagnosis, prevention, and/or treatment of immune system disorders; particularly immune cell proliferative disorders (e.g. leukemia), autoimmune disorders, and immunodeficiencies (including immunodeficiencies caused by genetic factors, microbial pathogens (e.g. HIV), chemotherapy, and radiation). See “Immune Activity” section, infra.

[0189] The tissue distribution also indicates polynucleotides and polypeptides corresponding to this gene, as well as antibodies against those polypeptides, may be useful for the diagnosis, prevention, and/or treatment of cancer and other hyperproliferative disorders (e.g., see “Hyperproliferative Disorders” section, infra).

Features of Protein Encoded by Gene No: 42

[0190] The computer algorithm BLASTX has been used to determine that the translation product of this gene shares sequence homology with, as a non-limiting example, the sequence accessible through the following database accession no. sp|BAA91205|BAA91205 (all information available through the recited accession number is incorporated herein by reference) which is described therein as “cDNA FLJ20489 FIS, CLONE KAT08285.” Based on the structural similarity these homologous polypeptides are expected to share at least some biological activities. Such activities are known in the art, some of which are described elsewhere herein. Assays for determining such activities are also known in the art, some of which have been described elsewhere herein. Preferred polypeptides of the invention comprise a polypeptide having the amino acid sequence set out in the sequence listing as SEQ ID NO: 414.

[0191] This gene is expressed in the following tissues/cDNA libraries: Primary Dendritic Cells, lib 1 and to a lesser extent in Rectum normal; Human Thymus; Healing groin wound, 7.5 hours post incision; Jurkat cells, thiouridine activated, fract II; NK CellsYao20 IL2 treated for 48 hrs; NCI_CGAP_Ov23; Adenocarcinoma of Ovary, Human Cell Line, # OVCAR-3; Human pancreatic islet; Human Pre-Differentiated Adipocytes; Breast, Cancer: (4004943 A5); Healing groin wound—zero hr post-incision (control); NCI_CGAP_CLL1; Macrophage (GM-CSF treated); Myoloid Progenitor Cell Line; B-cells (stimulated); NCI_CGAP_Kid3; Dendritic cells, pooled; H. Frontal cortex, epileptic, re-excision; NTERA2 teratocarcinoma cell line+retinoic acid (14 days); normalized infant brain cDNA; T cell helper II; Soares_pregnant_uterus_NbHPU; NCI_CGAP_GCB1 and NCI_CGAP_Sub5.

Features of Protein Encoded by Gene No: 43

[0192] Preferred polypeptides of the invention comprise a polypeptide having the amino acid sequence set out in the sequence listing as SEQ ID NO:415, SEQ ID NO: 416 and/or SEQ ID NO:417.

[0193] This gene is expressed in the following tissues/cDNA libraries: Skin, burned; CD34 depleted Buffy Coat (Cord Blood).

[0194] The tissue distribution indicates polynucleotides and polypeptides corresponding to this gene, as well as antibodies against those polypeptides, may be useful for the diagnosis, prevention, and/or treatment of wound healing and disorders of epithelial cell proliferation; particularly chronically open wounds, skin grafting, and cancers of epithelial tissues (e.g. lung and colon cancer). See “Wound Healing and Epithelial Cell Proliferation” section, infra.

Features of Protein Encoded by Gene No: 44

[0195] The computer algorithm BLASTX has been used to determine that the translation product of this gene shares sequence homology with, as a non-limiting example, the sequence accessible through the following database accession no. pir|T08708|T08708 (all information available through the recited accession number is incorporated herein by reference). Preferred polypeptides of the invention comprise a polypeptide having the amino acid sequence set out in the sequence listing as SEQ ID NO: 418.

[0196] This gene is expressed in the following tissues/cDNA libraries: Soares_testis_NHT and to a lesser extent in NCI_CGAP_Ut1; Soares_fetal_liver_spleen_{—}1NFLS_S1; Soares_NFL_T_GBC_S1; NCI_CGAP_Pr10; Human Fetal Kidney, Reexcision; Soares_fetal lung_NbHL19W; Soares_total_fetus_Nb2HF8_{—}9w; Soares_pregnant_uterus_NbHPU; Soares infant brain 1NIB; NCI_CGAP_Ut4; NCI_CGAP_Br2; Soares breast 2NbHBst; NCI_CGAP_Kid11; NCI_CGAP_Kid5; NCI_CGAP_Brn23; Soares_multiple_sclerosis_{—}2NbHMSP; NCI_CGAP_Lu5; Colon Tumor II; Soares_fetal_heart_NbHH19W; Human adult lung 3′ directed MboI cDNA; Jurkat Cells; NCI_CGAP_Kid12; Human White Adipose; NCI_CGAP_Lu24; NCI_CGAP_Ut3; Human Tonsils, Lib 2; NCI_CGAP_Co10; NCI_CGAP_Lym12; NCI_CGAP_Alv1; NCI_CGAP_Ut2; H. Lymph node breast Cancer; Breast, Normal: (4005522B2); H. Epididiymus, caput & corpus; Human Umbilical Vein, Reexcision; H. Epididiymus, cauda; NCI_CGAP_Pr28; NCI_CGAP_Gas4; Human Uterine Cancer; Palate normal; Fetal Heart; Soares breast 3NbHBst; NCI_CGAP_GC4; Adipocytes; Human Synovial Sarcoma; Human Ovarian Cancer Reexcision; Endothelial cells-control; NCI_CGAP_Brn25; Pancreas Islet Cell Tumor; Soares_senescent_fibroblasts_NbHSF; NCI_CGAP_Kid3; Prostate Adenocarcinoma; Soares ovary tumor NbHOT; NTERA2 teratocarcinoma cell line+retinoic acid (14 days); Nine Week Old Early Stage Human; NCI_CGAP_GCB1; Soares fetal liver spleen 1NFLS and NCI_CGAP_Br18.

[0197] The tissue distribution indicates polynucleotides and polypeptides corresponding to this gene, as well as antibodies against those polypeptides, may be useful for the diagnosis, prevention, and/or treatment of reproductive system disorders; particularly male and female infertility, placental and uterine disorders (e.g. endometriosis), and cancer of reproductive organs (e.g. testicular and ovarian cancer). See “Reproductive System Disorders” section, infra.

[0198] The tissue distribution also indicates polynucleotides and polypeptides corresponding to this gene, as well as antibodies against those polypeptides, may be useful for the diagnosis, prevention, and/or treatment of cancer and other hyperproliferative disorders (e.g., see “Hyperproliferative Disorders” section, infra).

Features of Protein Encoded by Gene No: 45

[0199] The computer algorithm BLASTX has been used to determine that the translation product of this gene shares sequence homology with, as a non-limiting example, the sequence accessible through the following database accession no. sp|P70222|P70222 (all information available through the recited accession number is incorporated herein by reference). Based on the structural similarity these homologous polypeptides are expected to share at least some biological activities. Such activities are known in the art, some of which are described elsewhere herein. Assays for determining such activities are also known in the art, some of which have been described elsewhere herein. Preferred polypeptides of the invention comprise a polypeptide having the amino acid sequence set out in the sequence listing as SEQ ID NO: 419, SEQ ID NO: 420 and/or SEQ ID NO:421.

[0200] This gene is expressed in the following tissues/cDNA libraries: Human adult small intestine, re-excision; Ovarian Tumor Oct. 3, 1995; Stomach Normal; Human Placenta; NTERA2, control; Endothelial-induced; Human Bone Marrow, treated; PC3 Prostate cell line.

[0201] The tissue distribution indicates polynucleotides and polypeptides corresponding to this gene, as well as antibodies against those polypeptides, may be useful for the diagnosis, prevention, and/or treatment of gastrointestinal system disorders; particularly inflammatory diseases (e.g. gastroenteritis and stomach ulcers) and gastrointestinal cancers (e.g. stomach and colon cancer. See “Gastrointestinal Disorders” section, infra. The tissue distribution also indicates polynucleotides and polypeptides corresponding to this gene, as well as antibodies against those polypeptides, may be useful for the diagnosis, prevention, and/or treatment of cancer and other hyperproliferative disorders (e.g., see “Hyperproliferative Disorders” section, infra).

Features of Protein Encoded by Gene No: 46

[0202] The computer algorithm BLASTX has been used to determine that the translation product of this gene shares sequence homology with, as a non-limiting example, the sequence accessible through the following database accession no. sp|Q908061Q90806 (all information available through the recited accession number is incorporated herein by reference) which is described therein as “OLFACTORY RECEPTOR 2 (FRAGMENT).” Based on the structural similarity these homologous polypeptides are expected to share at least some biological activities. Such activities are known in the art, some of which are described elsewhere herein. Assays for determining such activities are also known in the art, some of which have been described elsewhere herein. Preferred polypeptides of the invention comprise a polypeptide having the amino acid sequence set out in the sequence listing as SEQ ID NO:422.

[0203] This gene is expressed in Human Testes, Reexcision.

[0204] The tissue distribution indicates polynucleotides and polypeptides corresponding to this gene, as well as antibodies against those polypeptides, may be useful for the diagnosis, prevention, and/or treatment of reproductive system disorders; particularly male and female infertility, placental and uterine disorders (e.g. endometriosis), and cancer of reproductive organs (e.g. testicular and ovarian cancer). See “Reproductive System Disorders” section, infra.

Features of Protein Encoded by Gene No: 47

[0205] This gene is expressed in the following tissues/cDNA libraries: NCI_CGAP_Co8 and to a lesser extent in Colon Normal III; NCI_CGAP_Co3; Human Colon, re-excision; Normal colon; Soares ovary tumor NbHOT; NCI_CGAP_Lu19; NCI_CGAP_Kid12; Rectum tumour; NCI_CGAP_Sub3; Keratinocyte, lib 3; Human Colon, differential expression; Human colorectal cancer; NCI_CGAP_Ut3; NCI_CGAP_Co9; Ovarian cancer, Serous Papillary Adenocarcinoma; Prostate BPH; Healing groin wound, 7.5 hours post incision; Liver Tumour Met 5 Tu; Palate normal; Colon, normal; NCI_CGAP_Kid11 and Colon Normal II.

[0206] The tissue distribution indicates polynucleotides and polypeptides corresponding to this gene, as well as antibodies against those polypeptides, may be useful for the diagnosis, prevention, and/or treatment of gastrointestinal system disorders; particularly inflammatory diseases (e.g. gastroenteritis and stomach ulcers) and gastrointestinal cancers (e.g. stomach and colon cancer. See “Gastrointestinal Disorders” section, infra. The tissue distribution also indicates polynucleotides and polypeptides corresponding to this gene, as well as antibodies against those polypeptides, may be useful for the diagnosis, prevention, and/or treatment of cancer and other hyperproliferative disorders (e.g., see “Hyperproliferative Disorders” section, infra).

Features of Protein Encoded by Gene No: 48

[0207] The computer algorithm BLASTX has been used to determine that the translation product of this gene shares sequence homology with, as a non-limiting example, the sequence accessible through the following Genbank database accession no. sp|O95413|O095413 (all information available through the recited accession number is incorporated herein by reference) which is described therein as “SIALOMUCIN CD164.” Based on the structural similarity these homologous polypeptides are expected to share at least some biological activities. Such activities are known in the art, some of which are described elsewhere herein. Assays for determining such activities are also known in the art, some of which have been described elsewhere herein. Preferred polypeptides of the invention comprise a polypeptide having the amino acid sequence set out in the sequence listing as SEQ ID NO: 423.

[0208] This gene is expressed in Chondrocytes.

[0209] The tissue distribution indicates polynucleotides and polypeptides corresponding to this gene, as well as antibodies against those polypeptides, may be useful for the diagnosis, prevention, and/or treatment of skeletomuscular system disorders and abnormalities; particularly rheumatoid arthritis and cartilage regeneration.

Features of Protein Encoded by Gene No: 49

[0210] The computer algorithm BLASTX has been used to determine that the translation product of this gene shares sequence homology with, as a non-limiting example, the sequence accessible through the following database accession no. sp|Q9VTS0|Q9VTS0 (all information available through the recited accession number is incorporated herein by reference) which is described therein as “CG6938 PROTEIN.” Based on the structural similarity these homologous polypeptides are expected to share at least some biological activities. Such activities are known in the art, some of which are described elsewhere herein. Assays for determining such activities are also known in the art, some of which have been described elsewhere herein. Preferred polypeptides of the invention comprise a polypeptide having the amino acid sequence set out in the sequence listing as SEQ ID NO: <SEQ ID NO:424.

[0211] This gene is expressed in the following tissues/cDNA libraries: Colon Normal III and to a lesser extent in Healing Abdomen wound, 70&90 min post incision; CD40 activated monocyte dendritic cells; Ulcerative Colitis; Ovarian Tumor Oct. 3, 1995 and Rejected Kidney, lib 4.

[0212] The tissue distribution indicates polynucleotides and polypeptides corresponding to this gene, as well as antibodies against those polypeptides, may be useful for the diagnosis, prevention, and/or treatment of gastrointestinal system disorders; particularly inflammatory diseases (e.g. gastroenteritis and stomach ulcers) and gastrointestinal cancers (e.g. stomach and colon cancer. See “Gastrointestinal Disorders” section, infra.

Features of Protein Encoded by Gene No: 50

[0213] Preferred polypeptides of the invention comprise a polypeptide having the amino acid sequence set out in the sequence listing as SEQ ID NO:425, SEQ ID NO:426 and/or SEQ ID NO:427.

[0214] This gene is expressed in the following tissues/cDNA libraries: NCI_CGAP_Ut1; Human Activated T-Cells; Human Neutrophil, Activated; Soares ovary tumor NbHOT.

[0215] The tissue distribution indicates polynucleotides and polypeptides corresponding to this gene, as well as antibodies against those polypeptides, may be useful for the diagnosis, prevention, and/or treatment of immune system disorders; particularly immune cell proliferative disorders (e.g. leukemia), autoimmune disorders, and immunodeficiencies (including immunodeficiencies caused by genetic factors, microbial pathogens (e.g. HIV), chemotherapy, and radiation). See “Immune Activity” section, infra.

Features of Protein Encoded by Gene No: 51

[0216] The computer algorithm BLASTX has been used to determine that the translation product of this gene shares sequence homology with, as a non-limiting example, the sequence accessible through the following Genbank database accession no. sp|Q9UHT1|Q9UHT1 (all information available through the recited accession number is incorporated herein by reference) which is described therein as “PRO1902”. Based on the structural similarity these homologous polypeptides are expected to share at least some biological activities. Such activities are known in the art, some of which are described elsewhere herein. Assays for determining such activities are also known in the art, some of which have been described elsewhere herein. Preferred polypeptides of the invention comprise a polypeptide having the amino acid sequence set out in the sequence listing as SEQ ID NO: 428 and/or SEQ ID NO: 429.

[0217] This gene is expressed in the following tissues/cDNA libraries: H. cerebellum, Enzyme subtracted; Human Whole Brain, re-excision; NCI_CGAP_Lu5.

[0218] The tissue distribution indicates polynucleotides and polypeptides corresponding to this gene, as well as antibodies against those polypeptides, may be useful for the diagnosis, prevention, and/or treatment of neurological disorders; particularly brain cancer and neurodegenerative disorders (such as Alzheimer's, Parkinson's and Huntington's Disease). See “Neural Activity and Neurological Diseases” section, infra.

Features of Protein Encoded by Gene No: 52

[0219] This gene is expressed in the following tissues/cDNA libraries: Soares_fetal_heart_NbHH19W and to a lesser extent in NCI_CGAP_CLL1; Human Cerebellum; Colon Tumor II; Colon Normal III; Stratagene hNT neuron (#937233); Soares_parathyroid tumor_NbHPA; 1-NIB; NCI_CGAP_Brn52 NCI_CGAP_Co1; NCI_CGAP_Lu24; NCI_CGAP_Ut4; NCI_CGAP_Ut3; Patient #6 Acute Myeloid Leukemia/SGAH; Stratagene fetal spleen (#937205); Palate carcinoma; NCI_CGAP_Kid11; T-Cell PHA 24 hrs; Corpus Callosum; NCI_CGAP_Lu19; Whole 6 Week Old Embryo; Lung, Normal: (4005313 B1); Human (Caco-2) cell line, adenocarcinoma, colon, remake; NCI_CGAP_Co11; Human (HCC) cell line liver (mouse) metastasis, remake; NCI_CGAP_Kid8; Human Cerebellum, subtracted; Lung, Cancer (4005313 A3): Invasive Poorly Differentiated Lung Adenocarcinoma; Human adult (K. Okubo); Breast, Cancer: (4005522 A2); Human Osteoclastoma Stromal Cells—unamplified; B Cell lymphoma; NCI_CGAP_Co14; Human Amygdala, re-excision; wilm's tumor; Human Infant Brain; NCI_CGAP_Gas4; Human Chondrosarcoma; Soares adult brain N2b5HB55Y; NCI_CGAP_Pan1; Colon Normal II; Human Synovial Sarcoma; Bone marrow; NCI_CGAP_GC6; Pancreas Islet Cell Tumor; Soares_senescent_fibroblasts_NbHSF; NCI_CGAP_Kid5; T Cell helper I; Resting T-Cell Library, II; Soares melanocyte 2NbHM; Keratinocyte; Nine Week Old Early Stage Human; Activated T-cell(12 h)/Thiouridine-re-excision; NCI_CGAP_GCB1; Primary Dendritic Cells, lib 1 and NCI_CGAP_GU1.

[0220] The tissue distribution indicates polynucleotides and polypeptides corresponding to this gene, as well as antibodies against those polypeptides, may be useful for the diagnosis, prevention, and/or treatment of cardiovascular disorders; particularly heart disease, high blood pressure, cardiac ischemia, and coronary artery disease. See “Cardiovascular Disorders” section, infra. The tissue distribution also indicates polynucleotides and polypeptides corresponding to this gene, as well as antibodies against those polypeptides, may be useful for the diagnosis, prevention, and/or treatment of cancer and other hyperproliferative disorders (e.g., see “Hyperproliferative Disorders” section, infra).

Features of Protein Encoded by Gene No: 53

[0221] The computer algorithm BLASTX has been used to determine that the translation product of this gene shares sequence homology with, as a non-limiting example, the sequence accessible through the following database accession no. sp|CAC00650|CAC00650 (all information available through the recited accession number is incorporated herein by reference) which is described therein as “ER protein 58.” Based on the structural similarity these homologous polypeptides are expected to share at least some biological activities. Such activities are known in the art, some of which are described elsewhere herein. Assays for determining such activities are also known in the art, some of which have been described elsewhere herein. Preferred polypeptides of the invention comprise a polypeptide having the amino acid sequence set out in the sequence listing as SEQ ID NO:430 and/or SEQ ID NO:431.

[0222] This gene is expressed in the following tissues/cDNA libraries: Soares fetal liver spleen 1NFLS and to a lesser extent in Stratagene HeLa cell s3 937216; NTERA2+retinoic acid, 14 days; NCI_CGAP_Kid11; CAMA1Ee Cell Line; NCI_CGAP_Kid12; NCI_CGAP_Lu24; Human OB HOS treated (10 nM E2) fraction I; Lung, Cancer (4005163 B7): Invasive, Poorly Diff. Adenocarcinoma, Metastatic; Human Osteoclastoma, re-excision; Human Chronic Synovitis; Stratagene lung carcinoma 937218; Gessler Wilms tumor; TNFR degenerate oligo; 12 Week Old Early Stage Human, II; Ovary, Cancer: (15799A1F) Poorly differentiated carcinoma; NCI_CGAP_GC4; NCI_CGAP_GC6; Human Osteoclastoma; Human Fetal Heart; Human Thymus Stromal Cells; NTERA2 teratocarcinoma cell line+retinoic acid (14 days); Human Endometrial Tumor; Human 8 Week Whole Embryo; Soares_fetal_lung_NbHL19W; Colon Tumor II; Soares_fetal_liver_spleen_{—}1NFLS_S1 and Soares_NhHMPu_S1.

[0223] The tissue distribution indicates polynucleotides and polypeptides corresponding to this gene would be useful for the diagnosis, prevention, and or treatment of liver disorders and cancers. For example, the protein can be used for the detection, treatment, and/or prevention of Wilson's disease, cirrhosis, fibrosis, bilirubin metabolism, hepatomegaly, cholestasis, liver cancer (for example, hepatoblastoma), jaundice, hepatitis (acuta and chronic) and liver metabolic diseases and conditions attributable to the differentiation of hepatocyte progenitor cells. The tissue distribution also indicates polynucleotides and polypeptides corresponding to this gene, as well as antibodies against those polypeptides, may be useful for the diagnosis, prevention, and/or treatment of cancer and other hyperproliferative disorders (e.g., see “Hyperproliferative Disorders” section, infra).

Features of Protein Encoded by Gene No: 54

[0224] This gene is expressed in the following tissues/cDNA libraries: Human Activated T-Cells, re-excision and to a lesser extent in NCI_CGAP_Brn35; Human Hypothalamus, schizophrenia, re-excision; Human Testes Tumor, re-excision and Activated T-cell(12 h)/Thiouridine-re-excision.

[0225] The tissue distribution indicates polynucleotides and polypeptides corresponding to this gene, as well as antibodies against those polypeptides, may be useful for the diagnosis, prevention, and/or treatment of immune system disorders; particularly immune cell proliferative disorders (e.g. leukemia), autoimmune disorders, and immunodeficiencies (including immunodeficiencies caused by genetic factors, microbial pathogens (e.g. HIV), chemotherapy, and radiation). See “Immune Activity” section, infra.

Features of Protein Encoded by Gene No: 55

[0226] This gene is expressed in the following tissues/cDNA libraries: Human Endometrial Tumor and to a lesser extent in Human Activated T-Cells, re-excision; Spleen, Chronic lymphocytic leukemia; Bone Marrow Cell Line (RS4,11); H. Leukocytes, control; Jurkat Cells; Human B Cell 8866; Amniotic Cells—Primary Culture; Ovarian Cancer; Human Thymus; HUMAN JURKAT MEMBRANE BOUND POLYSOMES; Human Activated Monocytes; Healing groin wound, 7.5 hours post incision; breast lymph node cDNA library; Early Stage Human Brain; CHME Cell Line, treated 5 hrs; Normal colon; Primary Dendritic cells, frac 2; Anergic T-cell; Human Fetal Heart; Endothelial cells-control; human tonsils; Human Microvascular Endothelial Cells, fract. A; Human Placenta; Monocyte activated; T-Cell PHA 24 hrs and Human Cerebellum.

[0227] The tissue distribution indicates polynucleotides and polypeptides corresponding to this gene, as well as antibodies against those polypeptides, may be useful for the diagnosis, prevention, and/or treatment of reproductive system disorders; particularly male and female infertility, placental and uterine disorders (e.g. endometriosis), and cancer of reproductive organs (e.g. testicular and ovarian cancer). See “Reproductive System Disorders” section, infra. The tissue distribution also indicates polynucleotides and polypeptides corresponding to this gene, as well as antibodies against those polypeptides, may be useful for the diagnosis, prevention, and/or treatment of immune system disorders; particularly immune cell proliferative disorders (e.g. leukemia), autoimmune disorders, and immunodeficiencies (including immunodeficiencies caused by genetic factors, microbial pathogens (e.g. HIV), chemotherapy, and radiation). See “Immune Activity” section, infra.

Features of Protein Encoded by Gene No: 56

[0228] This gene is expressed in the following tissues/cDNA libraries: NCI_CGAP_GCB1 and to a lesser extent in NCI_CGAP_Brn25; Human Neutrophil, Activated; Soares_senescent_fibroblasts_NbHSF; Soares_testis_NHT; NCI_CGAP_CLL1; Spleen, Chronic lymphocytic leukemia; Soares_parathyroid_tumor_NbHPA; Soares_pregnant_uterus_NbHPU; Neuroblastoma; Soares breast 2NbHBst; Soares_fetal_lung_NbHL19W; Soares placenta Nb2HP; NCI_CGAP_Brn53; Human Umbilical Vein, Endo. remake; CD34 depleted Buffy Coat (Cord Blood); NCI_CGAP_Pr22; Stratagene pancreas (#937208); CHME Cell Line, untreated; CHME Cell Line, treated 5 hrs; Human Fetal Lung III; CD34 depleted Buffy Coat (Cord Blood), re-excision; NCI_CGAP_Kid3; neutrophils control; Soares_fetal_heart_NbHH19W; Soares fetal liver spleen 1NFLS; b4HB3MA-FT20%-Biotin; Activated T-Cells, 8 hrs, subtracted; NCI_CGAP_GCB0; Human epithelioid sarcoma; Normal Human Trabecular Bone Cells; Human Neutrophils, Activated, re-excision; NCI_CGAP_Ut4; Adenocarcinoma of Ovary, Human Cell Line; Stratagene placenta (#937225); Smooth muscle, IL1b induced; Amniotic Cells—Primary Culture; NCI_CGAP_Co10; NCI_CGAP_Co14; NCI_CGAP_Lym12; Jurkat T-cell G1 phase; NCI_CGAP_Pr28; NCI_CGAP_Gas4; Human Activated Monocytes; Human Thymus; Human Whole Six Week Old Embryo; Human Testes Tumor, re-excision; Human adult testis, large inserts; Ovarian Tumor Oct. 3, 1995; breast lymph node cDNA library; Human Substantia Nigra; Ovary, Cancer (9809C332): Poorly differentiated adenocarcinoma; Human Synovial Sarcoma; Neutrophils control, re-excision; T-Cell PHA 16 hrs; NTERA2, control; Endothelial-induced; Activated T-Cell (12 hs)/Thiouridine labelledEco; B-cells (stimulated); NCI_CGAP_Kid5; NCI_CGAP_Brn23; Human Placenta; Human Bone Marrow, treated; Soares ovary tumor NbHOT; Dendritic cells, pooled; NTERA2 teratocarcinoma cell line+retinoic acid (14 days); Hodgkin's Lymphoma II; T cell helper II; Soares infant brain 1NIB; NCI_CGAP_Lu28 and NCI_CGAP_Sub6.

[0229] The tissue distribution indicates polynucleotides and polypeptides corresponding to this gene, as well as antibodies against those polypeptides, may be useful for the diagnosis, prevention, and/or treatment of immune system disorders; particularly immune cell proliferative disorders (e.g. leukemia), autoimmune disorders, and immunodeficiencies (including immunodeficiencies caused by genetic factors, microbial pathogens (e.g. HIV), chemotherapy, and radiation). See “Immune Activity” section, infra. The tissue distribution also indicates polynucleotides and polypeptides corresponding to this gene, as well as antibodies against those polypeptides, may be useful for the diagnosis, prevention, and/or treatment of neurological disorders; particularly brain cancer and neurodegenerative disorders (such as Alzheimer's, Parkinson's and Huntington's Disease). See “Neural Activity and Neurological Diseases” section, infra.

Features of Protein Encoded by Gene No: 57

[0230] This gene is expressed in Neutrophils IL-1 and LPS induced.

[0231] The tissue distribution indicates polynucleotides and polypeptides corresponding to this gene, as well as antibodies against those polypeptides, may be useful for the diagnosis, prevention, and/or treatment of immune system disorders; particularly immune cell proliferative disorders (e.g. leukemia), autoimmune disorders, and immunodeficiencies (including immunodeficiencies caused by genetic factors, microbial pathogens (e.g. HIV), chemotherapy, and radiation). See “Immune Activity” section, infra.

Features of Protein Encoded by Gene No: 58

[0232] The computer algorithm BLASTX has been used to determine that the translation product of this gene shares sequence homology with, as a non-limiting example, the sequence accessible through the following database accession no. pir|T33123|T33123 (all information available through the recited accession number is incorporated herein by reference). Based on the structural similarity these homologous polypeptides are expected to share at least some biological activities. Such activities are known in the art, some of which are described elsewhere herein. Assays for determining such activities are also known in the art, some of which have been described elsewhere herein. Preferred polypeptides of the invention comprise a polypeptide having the amino acid sequence set out in the sequence listing as SEQ ID NO: 432.

[0233] This gene is expressed in the following tissues/cDNA libraries: Soares_testis_NHT and to a lesser extent in Soares_fetal_heart_NbHH19W; Soares breast 3NbHBst; Colon Normal III; Soares infant brain 1NIB; Pancreas Islet Cell Tumor; NCI_CGAP_GCB1; Soares_fetal_lung NbHL19W; Hepatocellular Tumor, re-excision; NCI_CGAP_Kid5; NCI_CGAP_Brn23; Soares fetal liver spleen 1NFLS; NCI_CGAP_Co14; NCI_CGAP_Ut1; NCI_CGAP_Brn25; Soares_parathyroid_tumor_NbHPA; Hepatocellular Tumor, re-excision; NCI_CGAP_Pr3; NCI_CGAP_Pan1; Soares_placenta_{—}8 to 9 weeks_{—}2NbHP8 to 9W; Human Thymus Stromal Cells; Human Fetal Kidney; NCI_CGAP_Co3; Human Liver, normal; Early Stage Human Brain; Human Endometrial Tumor; Colon Tumor II; Soares_total_fetus_Nb2HF8_{—}9w; Primary Dendritic Cells, lib 1; Smooth Muscle Serum Treated, Norm; NCI_CGAP_Ut4; NCI_CGAP_Ut3; human corpus colosum; Human normal ovary (#9610G215); H. Kidney Cortex, subtracted; Human endometrial stromal cells; Colon Normal; Human Umbilical Vein Endothelial Cells, uninduced; Stratagene HeLa cell s3 937216; CHME Cell Line, untreated; Palate carcinoma; Human Fetal Kidney, Reexcision; Normal colon; Endothelial-induced; B-cells (stimulated); Human Adult Pulmonary, re-excision; NCI_CGAP_Kid3; Monocyte activated; Soares ovary tumor NbHOT; NCI_CGAP_LuS; PC3 Prostate cell line; Hodgkin's Lymphoma II; Soares placenta Nb2HP; Soares_NhHMPu_S 1; Human Striatum Depression, re-rescue; NCI_CGAP_Lu19; NCI_CGAP_Kid12; HL-60, RA 4h, Subtracted; NCI_CGAP_Kid8; NCI_CGAP_Ov23; Stratagene neuroepithelium NT2RAMI 937234; Human Primary Breast Cancer; STRATAGENE Human skeletal muscle cDNA library, cat. #936215; Hepatocellular Tumor; B Cell lymphoma; Stratagene ovary (#937217); Human Whole Brain #2—Oligo dT>1.5 Kb; NCI_CGAP_Lym12; Synovial hypoxia; LNCAP prostate cell line; Human Chronic Synovitis; Human Adult Small Intestine; Stratagene lung carcinoma 937218; Stratagene neuroepithelium (#937231); H. Epididiymus, caput & corpus; Human Bone Marrow, re-excision; NCI_CGAP_Kid6; Human Prostate Cancer, Stage C, re-excission; Ovary, Cancer: (15799A1F) Poorly differentiated carcinoma; HUMAN JURKAT MEMBRANE BOUND POLYSOMES; NCI_CGAP_Gas4; Apoptotic T-cell; Human Hippocampus; Liver, Hepatoma; Human umbilical vein endothelial cells, IL-4 induced; Human Fetal Brain; Olfactory epithelium, nasalcavity; Human Whole Six Week Old Embryo; Stratagene liver (#937224); Fetal Liver, subtraction II; 12 Week Old Early Stage Human; NCI_CGAP_Co8; NCI_CGAP_GC4; Colon Normal II; NCI_CGAP_GC6; 12 Week Early Stage Human II, Reexcision; Primary Dendritic cells, frac 2; Human Primary Breast Cancer Reexcision; Human Adult Heart, re-excision; H. Frontal cortex, epileptic, re-excision; Keratinocyte; Activated T-cell(12 h)/Thiouridine-re-excision; Soares_pregnant_uterus_NbHPU; NCI_CGAP_Sub5; NCI_CGAP_Brn53; Leukocyte and Lung, 4 screens; Human Fetal Kidney; Thyroid Thyroiditis; Human colon mucosa; 7 Week Old Early Stage Human, subtracted; Human Umbilical Vein Endothelial cells, frac B, re-excision; Prostate; H. Striatum Depression, subtracted; Human osteoarthritis, fraction I; NCI_CGAP_HN4; NCI_CGAP_Co2; NCI_CGAP_Br3; Prostate Adenocarcinoma cell line cultured in vivo in mice; Ovarian Cancer Cell Line (Xenograft) ES-2; NCI_CGAP_Pr21; HUMAN TONSILS, FRACTION 2; Human retina cDNA Tsp509I-cleaved sublibrary; Barstead spleen HPLRB2; Human Aortic Endothelium; Human colon carcinoma (HCC) cell line, remake; Human Adult Pulmonary; NCI_CGAP_Pr25; Human Colon Carcinoma (HCC) cell line; Hodgkin's Lymphoma I; HSC172 cells; Human Pituitary, subtracted; Frontal lobe, dementia, re-excision; Supt Cells, cyclohexamide treated; Human Fetal Bone; human colon cancer; Aorta endothelial cells +TNF-a; Human heart cDNA (YNakamura); Lung, Cancer (4005163 B7): Invasive, Poorly Diff. Adenocarcinoma, Metastatic; Human Quadriceps; Human Colon Cancer, re-excision; Human Tonsils, Lib 2; STROMAL-OSTEOCLASTOMA; Alzheimers, spongy change; H Female Bladder, Adult; Ku 812F Basophils Line; Human pancreatic islet; Synovial hypoxia-RSF subtracted; Human Stomach, re-excision; Ovarian cancer, Serous Papillary Adenocarcinoma; NCI_CGAP_Co10; Ovarian Cancer, # 9702G001; Human Osteosarcoma; Colon, tumour; NCI_CGAP_Pr12; Human Adipose Tissue, re-excision; Human Pituitary, subt IX; Prostate BPH; NCI_CGAP_Ut2; Breast, Normal: (4005522B2); H. Kidney Medulla, re-excision; NCI_CGAP_Pr2; Colon Tumor; HM1; NCI_CGAP_Pr22; Breast Cancer Cell line, angiogenic; Monocyte activated, re-excision; NCI_CGAP_Pr28; Human Fetal Dura Mater; Stromal cell TF274; Human Prostate Cancer, Stage B2, re-excision; Macrophage-oxLDL; Human Hypothalmus, Schizophrenia; Soares_NSF_F8_{—}9W_OT_PA_P_S1; Ovary, Cancer (15395A1F): Grade II Papillary Carcinoma; CD40 activated monocyte dendridic cells; Human Thymus; Hemangiopericytoma; Human Chondrosarcoma; Human Activated T-Cells, re-excision; NCI_CGAP_CLL1; Soares breast 2NbHBst; Human Adrenal Gland Tumor; Ulcerative Colitis; Smooth muscle, serum induced, re-exc; Colon Tumor; Healing groin wound, 6.5 hours post incision; Ovarian Tumor Oct. 3, 1995; Colon, normal; Rectum tumour; breast lymph node cDNA library; Human endometrial stromal cells-treated with progesterone; NCI_CGAP_Kid11; CHME Cell Line, treated 5 hrs; H Macrophage (GM-CSF treated), re-excision; Adipocytes; Ovary, Cancer (9809C332): Poorly differentiated adenocarcinoma; Ovary, Cancer (4004650 A3): Well-Differentiated Micropapillary Serous Carcinoma; Human Synovial Sarcoma; Human Placenta; Pancreas normal PCA4 No; Human Fetal Lung III; T-Cell PHA 16 hrs; NTERA2, control; Myoloid Progenitor Cell Line; Activated T-Cell (12 hs)/Thiouridine labelledEco; Human Amygdala; Soares_senescent_fibroblasts_NbHSF; Soares_multiple_sclerosis_{—}2NbHMSP; Smooth muscle, control; Prostate Adenocarcinoma; Pancreas Tumor PCA4 Tu; Spleen, Chronic lymphocytic leukemia; NTERA2 teratocarcinoma cell line+retinoic acid (14 days); Osteoblasts; Soares melanocyte 2NbHM; Nine Week Old Early Stage Human; Human Cerebellum; Soares_NFL_T_GBC_S1; NCI_CGAP_GU1; NCI_CGAP_Co17; NCI_CGAP_Sar4; NCI_CGAP_Sub4 and NCI_CGAP_Kid13.

[0234] The tissue distribution indicates polynucleotides and polypeptides corresponding to this gene, as well as antibodies against those polypeptides, may be useful for the diagnosis, prevention, and/or treatment of reproductive system disorders; particularly male and female infertility, placental and uterine disorders (e.g. endometriosis), and cancer of reproductive organs (e.g. testicular and ovarian cancer). See “Reproductive System Disorders” section, infra. The tissue distribution also indicates polynucleotides and polypeptides corresponding to this gene, as well as antibodies against those polypeptides, may be useful for the diagnosis, prevention, and/or treatment of cancer and other hyperproliferative disorders (e.g., see “Hyperproliferative Disorders” section, infra).

Features of Protein Encoded by Gene No: 59

[0235] The computer algorithm BLASTX has been used to determine that the translation product of this gene shares sequence homology with, as a non-limiting example, the sequence accessible through the following database accession no. sp|AAF311621AAF31162 (all information available through the recited accession number is incorporated herein by reference) which is described therein as “Erythroid membrane-associated protein ERMAP.” Based on the structural similarity these homologous polypeptides are expected to share at least some biological activities. Such activities are known in the art, some of which are described elsewhere herein. Assays for determining such activities are also known in the art, some of which have been described elsewhere herein. Preferred polypeptides of the invention comprise a polypeptide having the amino acid sequence set out in the sequence listing as SEQ ID NO:433.

[0236] This gene is expressed in neural/sensory, reproductive, immune/hematopoietic tissues.

[0237] The protein homology indicates polynucleotides and polypeptides corresponding to this gene, as well as antibodies against those polypeptides, may be useful for the diagnosis, prevention, and/or treatment of hematopoietic disorders; particularly anemias, clotting disorders/abnormalities (e.g. hemophilia, myocardial infarction, stroke), and leukemia. See “Blood Related Disorders” section, infra. Also, for disorders in neural and reproductive systems. The tissue distribution indicates polynucleotides and polypeptides corresponding to this gene, as well as antibodies against those polypeptides, may be useful for the diagnosis, prevention, and/or treatment of cancer and other hyperproliferative disorders (e.g., see “Hyperproliferative Disorders” section, infra).

Features of Protein Encoded by Gene No: 60

[0238] This gene is expressed in the following tissues/cDNA libraries: NTERA2 teratocarcinoma cell line+retinoic acid (14 days); Activated T-cell(12 h)/Thiouridine-re-excision.

[0239] The tissue distribution indicates polynucleotides and polypeptides corresponding to this gene, as well as antibodies against those polypeptides, may be useful for the diagnosis, prevention, and/or treatment of cancer and other hyperproliferative disorders (e.g., see “Hyperproliferative Disorders” section, infra). The tissue distribution also indicates polynucleotides and polypeptides corresponding to this gene, as well as antibodies against those polypeptides, may be useful for the diagnosis, prevention, and/or treatment of immune system disorders; particularly immune cell proliferative disorders (e.g. leukemia), autoimmune disorders, and immunodeficiencies (including immunodeficiencies caused by genetic factors, microbial pathogens (e.g. HIV), chemotherapy, and radiation). See “Immune Activity” section, infra.

Features of Protein Encoded by Gene No: 61

[0240] This gene is expressed in the following tissues/cDNA libraries: NCI_CGAP_GC6; Soares infant brain 1NIB and to a lesser extent in Colon Normal II; T-Cell PHA 16 hrs; Monocyte activated; Spleen, Chronic lymphocytic leukemia and Soares_NFL_T_GBC_S1.

[0241] The tissue distribution indicates polynucleotides and polypeptides corresponding to this gene, as well as antibodies against those polypeptides, may be useful for the diagnosis, prevention, and/or treatment of neurological disorders; particularly brain cancer and neurodegenerative disorders (such as Alzheimer's, Parkinson's and Huntington's Disease). See “Neural Activity and Neurological Diseases” section, infra. The tissue distribution also indicates polynucleotides and polypeptides corresponding to this gene, as well as antibodies against those polypeptides, may be useful for the diagnosis, prevention, and/or treatment of immune system disorders; particularly immune cell proliferative disorders (e.g. leukemia), autoimmune disorders, and immunodeficiencies (including immunodeficiencies caused by genetic factors, microbial pathogens (e.g. HIV), chemotherapy, and radiation). See “Immune Activity” section, infra.

Features of Protein Encoded by Gene No: 62

[0242] The computer algorithm BLASTX has been used to determine that the translation product of this gene shares sequence homology with, as a non-limiting example, the sequence accessible through the following database accession no. sp|O95070|O95070 (all information available through the recited accession number is incorporated herein by reference) which is described therein as “54TMP”. Based on the structural similarity these homologous polypeptides are expected to share at least some biological activities. Such activities are known in the art, some of which are described elsewhere herein. Assays for determining such activities are also known in the art, some of which have been described elsewhere herein. Preferred polypeptides of the invention comprise a polypeptide having the amino acid sequence set out in the sequence listing as SEQ ID NO:434.

[0243] This gene is expressed in Myoloid Progenitor Cell Line.

[0244] The tissue distribution indicates polynucleotides and polypeptides corresponding to this gene, as well as antibodies against those polypeptides, may be useful for the diagnosis, prevention, and/or treatment of immune system disorders; particularly immune cell proliferative disorders (e.g. leukemia), autoimmune disorders, and immunodeficiencies (including immunodeficiencies caused by genetic factors, microbial pathogens (e.g. HIV), chemotherapy, and radiation). See “Immune Activity” section, infra.

Features of Protein Encoded by Gene No: 63

[0245] The computer algorithm BLASTX has been used to determine that the translation product of this gene shares sequence homology with, as a non-limiting example, the sequence accessible through the following database accession no. sp|AAF75771|AAF75771 (all information available through the recited accession number is incorporated herein by reference). Based on the structural similarity these homologous polypeptides are expected to share at least some biological activities. Such activities are known in the art, some of which are described elsewhere herein. Assays for determining such activities are also known in the art, some of which have been described elsewhere herein. Preferred polypeptides of the invention comprise a polypeptide having the amino acid sequence set out in the sequence listing as SEQ ID NO: 435.

[0246] This gene is expressed in digestive neural/sensory, musculoskeletal, immune/hematopoietic tissues/cDNA libraries, and expressed also in endocrine, reproductive system to a less extent.

[0247] The tissue distribution indicates polynucleotides and polypeptides corresponding to this gene, as well as antibodies against those polypeptides, may be useful for the diagnosis, prevention, and/or treatment of gastrointestinal system disorders; particularly inflammatory diseases (e.g. gastroenteritis and stomach ulcers) and gastrointestinal cancers (e.g. stomach and colon cancer. See “Gastrointestinal Disorders” section, infra. Also, disorders in neural systems and musculoskeletal and immune systems.

Features of Protein Encoded by Gene No: 64

[0248] This gene is expressed in the following tissues/cDNA libraries: Colon Tumor II; Soares_pregnant_uterus_NbHPU; Soares_fetal_heart_NbHH19W and to a lesser extent in Stratagene endothelial cell 937223; Hodgkin's Lymphoma II; Soares_NhHMPu_S1; Human Umbilical Vein, Endo. remake; Human Umbilical Vein Endothelial Cells, uninduced; Human umbilical vein endothelial cells, IL-4 induced; NCI_CGAP_Kid11; Human Pancreas Tumor, Reexcision; NCI_CGAP_Brn25; Stratagene lung (#937210); Human Adult Heart, re-excision; Human 8 Week Whole Embryo; Soares infant brain 1NIB; Soares fetal liver spleen 1NFLS; Human Lung; NCI_CGAP_Co14; Human Prostate; Stratagene muscle 937209; Human Umbilical Vein, Reexcision; Human Prostate Cancer, Stage C, re-excission; Human Placenta (re-excision); Soares breast 3NbHBst; Human Adult Pulmonary, re-excision; NCI_CGAP_Brn23; Soares_parathyroid_tumor_NbHPA; Soares_fetal_liver_spleen_{—}1NFLS_S1; NCI_CGAP_Sub3; Human colon cancer, metaticized to liver, subtraction; Human adult lung 3′ directed MboI cDNA; Human Fetal Liver, subtracted; H Umbilical Vein Endothelial Cells, frac A, re-excision; Human White Adipose; Human Umbilical Vein Endothelial Cells, fract. A; Lung, Cancer (4005163 B7): Invasive, Poorly Diff. Adenocarcinoma, Metastatic; Ovarian cancer, Serous Papillary Adenocarcinoma; Ovarian Cancer; Breast, Cancer: (4004943 A5); Brain Frontal Cortex, re-excision; Colon Tumor; NCI_CGAP_Ut1; Stratagene fetal spleen (#937205); NCI_CGAP_Pr28; Human Pancreas Tumor; Liver, Hepatoma; Soares_NSF_F8_{—}9W_OT_PA_P_S1; Ovary, Cancer (15395A1F): Grade II Papillary Carcinoma; CD40 activated monocyte dendridic cells; Ulcerative Colitis; Stratagene liver (#937224); NCI_CGAP_Pan1; Human Testes Tumor, re-excision; Ovary, Cancer: (4004576 A8); Palate normal; NCI_CGAP_GC4; Bone marrow; Human Neutrophil, Activated; Human Fetal Heart; NCI_CGAP_Kid5; Human Microvascular Endothelial Cells, fract. A and Nine Week Old Early Stage Human.

[0249] When tested against K562 leukemia cell lines, supernatants removed from cells containing this gene activated the ISRE assay. Thus, it is likely that this gene activates leukemia cells through the Jak-STAT signal transduction pathway. The interferon-sensitive response element is apromoter element found upstream of many genes which are involved in the Jak-STAT pathway. The Jak-STAT pathway is a large, signal transduction pathway involved in the differentiation and proliferation of cells. Therefore, activation of the Jak-STAT pathway, reflected by the binding of the ISRE element, can be used to indicate proteins involved in the proliferation and differentiation of cells.

[0250] The tissue distribution indicates polynucleotides and polypeptides corresponding to this gene, as well as antibodies against those polypeptides, may be useful for the diagnosis, prevention, and/or treatment of gastrointestinal system disorders; particularly inflammatory diseases (e.g. gastroenteritis and stomach ulcers) and gastrointestinal cancers (e.g. stomach and colon cancer. See “Gastrointestinal Disorders” section, infra. The tissue distribution indicates polynucleotides and polypeptides corresponding to this gene, as well as antibodies against those polypeptides, may be useful for the diagnosis, prevention, and/or treatment of cancer and other hyperproliferative disorders (e.g., see “Hyperproliferative Disorders” section, infra).

[0251] The tissue distribution in immune cells and the fact that polypeptides of the invention activated the ISRE assay indicates the polynucleotides and polypeptides corresponding to this gene would be useful for the diagnosis and treatment of a variety of immune system disorders. Representative uses are described in the “Immune Activity” and “Infectious Disease” sections below, in Example 11, 13, 14, 16, 18, 19, 20, and 27, and elsewhere herein. Briefly, the expression indicates a role in regulating the proliferation; survival; differentiation; and/or activation of hematopoietic cell lineages, including blood stem cells. Involvement in the regulation of cytokine production, antigen presentation, or other processes suggests a usefulness for treatment of cancer (e.g. by boosting immune responses). Expression in cells of lymphoid origin, indicates the natural gene product would be involved in immune functions. Therefore it would also be useful as an agent for immunological disorders including arthritis, asthma, immunodeficiency diseases such as AIDS, leukemia, rheumatoid arthritis, granulomatous disease, inflammatory bowel disease, sepsis, acne, neutropenia, neutrophilia, psoriasis, hypersensitivities, such as T-cell mediated cytotoxicity; immune reactions to transplanted organs and tissues, such as host-versus-graft and graft-versus-host diseases, or autoimmunity disorders, such as autoimmune infertility, lense tissue injury, demyelination, systemic lupus erythematosis, drug induced hemolytic anemia, rheumatoid arthritis, Sjogren's disease, and scleroderma. Moreover, the protein may represent a secreted factor that influences the differentiation or behavior of other blood cells, or that recruits hematopoietic cells to sites of injury. Thus, this gene product is thought to be useful in the expansion of stem cells and committed progenitors of various blood lineages, and in the differentiation and/or proliferation of various cell types. Furthermore, the protein may also be used to determine biological activity, raise antibodies, as tissue markers, to isolate cognate ligands or receptors, to identify agents that modulate their interactions, in addition to its use as a nutritional supplement. Protein, as well as, antibodies directed against the protein may show utility as a tumor marker and/or immunotherapy targets for the above listed tissues.

Features of Protein Encoded by Gene No: 65

[0252] The computer algorithm BLASTX has been used to determine that the translation product of this gene shares sequence homology with, as a non-limiting example, the sequence accessible through the following Genbank database accession no. sp|BAA91131 |BAA91131 (all information available through the recited accession number is incorporated herein by reference) which is described therein as “cDNA FLJ20378 FIS, CLONE KAIA0536. Based on the structural similarity these homologous polypeptides are expected to share at least some biological activities. Such activities are known in the art, some of which are described elsewhere herein. Assays for determining such activities are also known in the art, some of which have been described elsewhere herein. Preferred polypeptides of the invention comprise a polypeptide having the amino acid sequence set out in the sequence listing as SEQ ID NO: 436. PFAM analysis of this clone reveals a conserved motif known as HIV R-ORF/X-ORF protein signature. Genetic variation in HIV-1 and HIV-2 has been studied extensively, and the nucleotide sequences reported for several strains. ORF analysis has revealed 2 open reading frames, yielding the so-called R- and X-ORF proteins, whose functions are unknown, but which show a high degree of sequence similarity. HIVVPRVPX is a 3-element fingerprint that provides a signature for the HIV R-ORF and X-ORF proteins. The fingerprint was derived from an initial alignment of 8 sequences: the motifs were drawn from short conserved regions spanning the full alignment length.

[0253] This gene is expressed in Ovarian Cancer, # 9702G001.

[0254] The tissue distribution indicates polynucleotides and polypeptides corresponding to this gene, as well as antibodies against those polypeptides, may be useful for the diagnosis, prevention, and/or treatment of cancer and other hyperproliferative disorders (e.g., see “Hyperproliferative Disorders” section, infra). The tissue distribution also indicates polynucleotides and polypeptides corresponding to this gene, as well as antibodies against those polypeptides, may be useful for the diagnosis, prevention, and/or treatment of reproductive system disorders; particularly male and female infertility, placental and uterine disorders (e.g. endometriosis), and cancer of reproductive organs (e.g. testicular and ovarian cancer). See “Reproductive System Disorders” section, infra.

Features of Protein Encoded by Gene No: 66

[0255] The computer algorithm BLASTX has been used to determine that the translation product of this gene shares sequence homology with, as a non-limiting example, the sequence accessible through the following database accession no. pir|B64816|B64816 (all information available through the recited accession number is incorporated herein by reference) which is described therein as “ABC-type transport protein ybhF—Escherichia coli”. Based on the structural similarity these homologous polypeptides are expected to share at least some biological activities. Such activities are known in the art, some of which are described elsewhere herein. Assays for determining such activities are also known in the art, some of which have been described elsewhere herein. Preferred polypeptides of the invention comprise a polypeptide having the amino acid sequence set out in the sequence listing as SEQ ID NO: 437.

[0256] This gene is expressed in the following tissues/cDNA libraries: Smooth muscle, control and to a lesser extent in Spinal cord; neutrophils control; Human Frontal Cortex, Schizophrenia; H Macrophage (GM-CSF treated), re-excision; Human Neutrophil, Activated; Human aorta polyA+ (TFujiwara); Brain Frontal Cortex, re-excision; Osteoblasts; Human Primary Breast Cancer Reexcision; Prostate BPH; Brain frontal cortex; Endothelial cells-control; Bone Cancer; Smooth muscle, control, re-excision; Stratagene placenta (#937225); Stratagene ovary (#937217); Spinal Cord, re-excision; Human Brain, Striatum; Macrophage (GM-CSF treated); Human Substantia Nigra; Neutrophils control, re-excision; Human Cardiomyopathy, subtracted; Human Neutrophils, Activated, re-excision; Human Primary Breast Cancer; Smooth Muscle-HASTE normalized; Human Whole Brain #2—Oligo dT>1.5 Kb; Human Neutrophil; Stratagene ovarian cancer (#937219); 12 Week Old Early Stage Human, II; Stratagene HeLa cell s3 937216; 12 Week Early Stage Human II, Reexcision; Human Trachea Tumor; Human Primary Breast Cancer; Brain medulla oblongata; NCI_CGAP_Lym3; Human Prostate BPH, re-excision; NCI_CGAP_Co2; Hep G2 Cells, lambda library; NCI_CGAP_Sch1; Human colon carcinoma (HCC) cell line, remake; NCI_CGAP_Co12; Apoptotic T-cell, re-excision; Human Synovium; Human Prostate Cancer, Stage C fraction; Smooth muscle, IL1b induced; Human Adipose Tissue, re-excision; Clontech human aorta polyA+ mRNA (#6572); Apoptotic T-cell; Human Testes Tumor, re-excision; Smooth muscle, serum induced, re-exc; Human adult testis, large inserts; Human Synovial Sarcoma; Human Placenta; Endothelial-induced; Human Microvascular Endothelial Cells, fract. A; HUMAN B CELL LYMPHOMA; H. Frontal cortex, epileptic, re-excision and Colon Normal III.

[0257] The tissue distribution indicates polynucleotides and polypeptides corresponding to this gene, as well as antibodies against those polypeptides, may be useful for the diagnosis, prevention, and/or treatment of neurological disorders; particularly brain cancer and neurodegenerative disorders (such as Alzheimer's, Parkinson's and Huntington's Disease). See “Neural Activity and Neurological Diseases” section, infra. The tissue distribution indicates polynucleotides and polypeptides corresponding to this gene, as well as antibodies against those polypeptides, may be useful for the diagnosis, prevention, and/or treatment of immune system disorders; particularly immune cell proliferative disorders (e.g. leukemia), autoimmune disorders, and immunodeficiencies (including immunodeficiencies caused by genetic factors, microbial pathogens (e.g. HIV), chemotherapy, and radiation). See “Immune Activity” section, infra.

Features of Protein Encoded by Gene No: 67

[0258] This gene is expressed in the following tissues/cDNA libraries: Prostate cancer (adenocarcinoma); Ovary, Cancer: (4004576 A8); T-Cell PHA 24 hrs.

[0259] The tissue distribution indicates polynucleotides and polypeptides corresponding to this gene, as well as antibodies against those polypeptides, may be useful for the diagnosis, prevention, and/or treatment of reproductive system disorders; particularly male and female infertility, placental and uterine disorders (e.g. endometriosis), and cancer of reproductive organs (e.g. testicular and ovarian cancer). See “Reproductive System Disorders” section, infra. The tissue distribution also indicates polynucleotides and polypeptides corresponding to this gene, as well as antibodies against those polypeptides, may be useful for the diagnosis, prevention, and/or treatment of cancer and other hyperproliferative disorders (e.g., see “Hyperproliferative Disorders” section, infra).

Features of Protein Encoded by Gene No: 68

[0260] The computer algorithm BLASTX has been used to determine that the translation product of this gene shares sequence homology with, as a non-limiting example, the sequence accessible through the following database accession no. sp|BAB01630|BAB01630 (all information available through the recited accession number is incorporated herein by reference). Preferred polypeptides of the invention comprise a polypeptide having the amino acid sequence set out in the sequence listing as SEQ ID NO: 438.

[0261] This gene is expressed in Neutrophils control, re-excision.

[0262] The tissue distribution indicates polynucleotides and polypeptides corresponding to this gene, as well as antibodies against those polypeptides, may be useful for the diagnosis, prevention, and/or treatment of immune system disorders; particularly immune cell proliferative disorders (e.g. leukemia), autoimmune disorders, and immunodeficiencies (including immunodeficiencies caused by genetic factors, microbial pathogens (e.g. HIV), chemotherapy, and radiation). See “Immune Activity” section, infra.

Features of Protein Encoded by Gene No: 69

[0263] This gene is expressed in the following tissues/cDNA libraries: Soares infant brain 1NIB and to a lesser extent in Stratagene lung carcinoma 937218; Soares_multiple_sclerosis_{—}2NbHMSP; Soares_NFL_T_GBC_S1; Soares_testis_NHT; Soares fetal liver spleen 1NFLS; NCI_CGAP_Mel3; Human epidermal keratinocyte; Infant brain, Bento Soares; NCI_CGAP_Kid8; NCI_CGAP_Ut4; Human Colon Cancer, re-excision; Synovial Fibroblasts (Il1/TNF), subt; Human Prostate; Gessler Wilms tumor; Human T-cell lymphoma, re-excision; Stratagene fetal spleen (#937205); L428; NCI_CGAP_Co3; Fetal Heart; NCI_CGAP_Kid11; Rejected Kidney, lib 4; Brain frontal cortex; 12 Week Early Stage Human II, Reexcision; NCI_CGAP_Kid3; Human fetal heart, Lambda ZAP Express; normalized infant brain cDNA; Hodgkin's Lymphoma II; Soares melanocyte 2NbHM; Keratinocyte; Colon Tumor II; Soares_total_fetus_Nb2HF8_{—}9w; Soares_NhHMPu_S1 and NCI_CGAP_GCB1.

[0264] The tissue distribution indicates polynucleotides and polypeptides corresponding to this gene, as well as antibodies against those polypeptides, may be useful for the diagnosis, prevention, and/or treatment of neurological disorders; particularly brain cancer and neurodegenerative disorders (such as Alzheimer's, Parkinson's and Huntington's Disease). See “Neural Activity and Neurological Diseases” section, infra.

Features of Protein Encoded by Gene No: 70

[0265] This gene is expressed in the following tissues/cDNA libraries: normalized infant brain cDNA; Soares infant brain 1NIB and to a lesser extent in Soares fetal liver spleen 1NFLS; NCI_CGAP_Kid11; NCI_CGAP_GC6; Human Thymus Stromal Cells; NCI_CGAP_Lu24; Breast, Normal: (4005522B2); Soares breast 3NbHBst; Human Fetal Kidney, Reexcision; NCI_CGAP_Brn25; Stratagene lung (#937210); NCI_CGAP_Lu5; NCI_CGAP_Kid12; Normalized infant brain, Bento Soares; Human Skeletal Muscle; Human retina cDNA randomly primed sublibrary; Human Ovarian Cancer (#9807G017); Stromal cells (HBM3.18); Human Synovium; Human Soleus; Human adult (K. Okubo); Alzheimers, spongy change; H Female Bladder, Adult; NCI_CGAP_Ut2; Spinal Cord, re-excision; Healing groin wound—zero hr post-incision (control); Healing groin wound, 7.5 hours post incision; NCI_CGAP_Co3; Macrophage-oxLDL, re-excision; Human Testes, Reexcision; Soares retina N2b4HR; H. Frontal cortex, epileptic, re-excision; Colon Tumor II; Soares_NFL_T_GBC_S1; Soares_testis_NHT and NCI_CGAP_Sub1.

[0266] The tissue distribution indicates polynucleotides and polypeptides corresponding to this gene, as well as antibodies against those polypeptides, may be useful for the diagnosis, prevention, and/or treatment of neurological disorders; particularly brain cancer and neurodegenerative disorders (such as Alzheimer's, Parkinson's and Huntington's Disease). See “Neural Activity and Neurological Diseases” section, infra.

Features of Protein Encoded by Gene No: 71

[0267] This gene is expressed in the following tissues/cDNA libraries: T-Cell PHA 16 hrs; CD34 positive cells (Cord Blood).

[0268] The tissue distribution indicates polynucleotides and polypeptides corresponding to this gene, as well as antibodies against those polypeptides, may be useful for the diagnosis, prevention, and/or treatment of immune system disorders; particularly immune cell proliferative disorders (e.g. leukemia), autoimmune disorders, and immunodeficiencies (including immunodeficiencies caused by genetic factors, microbial pathogens (e.g. HIV), chemotherapy, and radiation). See “Immune Activity” section, infra.

Features of Protein Encoded by Gene No: 72

[0269] This gene is expressed in Neutrophils control, re-excision.

[0270] The tissue distribution indicates polynucleotides and polypeptides corresponding to this gene, as well as antibodies against those polypeptides, may be useful for the diagnosis, prevention, and/or treatment of immune system disorders; particularly immune cell proliferative disorders (e.g. leukemia), autoimmune disorders, and immunodeficiencies (including immunodeficiencies caused by genetic factors, microbial pathogens (e.g. HIV), chemotherapy, and radiation). See “Immune Activity” section, infra.

Features of Protein Encoded by Gene No: 73

[0271] This gene is expressed in Dendritic Cells From CD34 Cells.

[0272] The tissue distribution indicates polynucleotides and polypeptides corresponding to this gene, as well as antibodies against those polypeptides, may be useful for the diagnosis, prevention, and/or treatment of immune system disorders; particularly immune cell proliferative disorders (e.g. leukemia), autoimmune disorders, and immunodeficiencies (including immunodeficiencies caused by genetic factors, microbial pathogens (e.g. HIV), chemotherapy, and radiation). See “Immune Activity” section, infra.

Features of Protein Encoded by Gene No: 74

[0273] This gene is expressed in Neutrophils control, re-excision.

[0274] The tissue distribution indicates polynucleotides and polypeptides corresponding to this gene, as well as antibodies against those polypeptides, may be useful for the diagnosis, prevention, and/or treatment of immune system disorders; particularly immune cell proliferative disorders (e.g. leukemia), autoimmune disorders, and immunodeficiencies (including immunodeficiencies caused by genetic factors, microbial pathogens (e.g. HIV), chemotherapy, and radiation). See “Immune Activity” section, infra.

Features of Protein Encoded by Gene No: 75

[0275] The computer algorithm BLASTX has been used to determine that the translation product of this gene shares sequence homology with, as a non-limiting example, the sequence accessible through the following database accession no. sp|Q14154|Y141_HUMAN (all information available through the recited accession number is incorporated herein by reference). Preferred polypeptides of the invention comprise a polypeptide having the amino acid sequence set out in the sequence listing as SEQ ID NO:439.

[0276] This gene is expressed in the following tissues/cDNA libraries: Human Activated T-Cells; Human Adult Heart, re-excision and to a lesser extent in Stratagene colon (#937204); Primary Dendritic Cells, lib 1; Macrophage-oxLDL, re-excision; breast lymph node cDNA library; Human Thymus Stromal Cells; Bone Marrow Cell Line (RS4,11); H Umbilical Vein Endothelial Cells, frac A, re-excision; Human (Caco-2) cell line, adenocarcinoma, colon, remake; Human OB HOS control fraction I; Early Stage Human Lung, subtracted; Breast Lymph node cDNA library; Cem cells cyclohexamide treated; Human Tonsils, Lib 2; Stratagene schizo brain S11; human corpus colosum; Smooth muscle, IL1b induced; Human Stomach, re-excision; Human Adult Small Intestine; Human Infant Brain; Human Thymus; Human Umbilical Vein Endothelial Cells, uninduced; Macrophage (GM-CSF treated); Healing groin wound, 6.5 hours post incision; Smooth muscle, serum treated; NCI_CGAP_Co8; Rejected Kidney, lib 4; Adipocytes; Myoloid Progenitor Cell Line; Endothelial-induced; Endothelial cells-control; Human Microvascular Endothelial Cells, fract. A; Hodgkin's Lymphoma II; Soares melanocyte 2NbHM; Human Cerebellum; NCI_CGAP_GCB1 and Soares infant brain 1NIB.

[0277] The tissue distribution indicates polynucleotides and polypeptides corresponding to this gene, as well as antibodies against those polypeptides, may be useful for the diagnosis, prevention, and/or treatment of immune system disorders; particularly immune cell proliferative disorders (e.g. leukemia), autoimmune disorders, and immunodeficiencies (including immunodeficiencies caused by genetic factors, microbial pathogens (e.g. HIV), chemotherapy, and radiation). See “Immune Activity” section, infra. The tissue distribution also indicates polynucleotides and polypeptides corresponding to this gene, as well as antibodies against those polypeptides, may be useful for the diagnosis, prevention, and/or treatment of cardiovascular disorders; particularly heart disease, high blood pressure, cardiac ischemia, and coronary artery disease. See “Cardiovascular Disorders” section, infra.

Features of Protein Encoded by Gene No: 76

[0278] The computer algorithm BLASTX has been used to determine that the translation product of this gene shares sequence homology with, as a non-limiting example, the sequence accessible through the following database accession no. pir|S14351|C1HUQC (all information available through the recited accession number is incorporated herein by reference) which is described therein as “complement subcomponent C1q chain C precursor—human”. Based on the structural similarity these homologous polypeptides are expected to share at least some biological activities. Such activities are known in the art, some of which are described elsewhere herein. Assays for determining such activities are also known in the art, some of which have been described elsewhere herein. Preferred polypeptides of the invention comprise a polypeptide having the amino acid sequence set out in the sequence listing as SEQ ID NO: 440.

[0279] This gene is expressed in the following tissues/cDNA libraries: Primary Dendritic Cells, lib 1 and to a lesser extent in Primary Dendritic cells, frac 2; Spleen, Chronic lymphocytic leukemia; Soares fetal liver spleen 1NFLS; Colon Tumor II; NCI_CGAP_Co8; Human Placenta; Human Adult Pulmonary, re-excision; Soares placenta Nb2HP; Colon Normal II; Soares_fetal_heart_NbHH19W; Human Pancreas Tumor; Soares breast 2NbHBst; Human Adipose; NCI_CGAP_Pan1; Human Placenta (re-excision); Ovary, Cancer: (4004576 A8); Human T-Cell Lymphoma; Soares breast 3NbHBst; Human Pancreas Tumor, Reexcision; Normal colon; human tonsils; Soares infant brain 1NIB; Human Spleen; Human Chronic Synovitis; Human Thymus; CD40 activated monocyte dendridic cells; Hemangiopericytoma; Human Fetal Brain; Stratagene liver (#937224); Colon Tumor; Rejected Kidney, lib 4; Ovary, Cancer (9809C332): Poorly differentiated adenocarcinoma; Human Fetal Kidney, Reexcision; Soares_placenta_{—}8 to 9 weeks_{—}2NbHP8 to 9W; Colon Normal III; b4HB3MA-Cot109+10-Bio; Human Resting Macrophage; Human Thymus; Human Adult Lymph Node, subtracted; Human Fetal Brain, normalized C500H; Human Adult Skeletal Muscle; Prostate BPH, Lib 2, subtracted; Infant brain, LLNL array of Dr. M. Soares 1NIB; Tongue carcinoma; Human Gastrocnemius; Human fetal lung; STRIATUM DEPRESSION; Lung, Normal: (4005313 B1); NCI_CGAP_Eso2; Normalized infant brain, Bento Soares; stomach cancer (human); Barstead spleen HPLRB2; NCI_CGAP_Lu24; SKIN; stromal cell clone 2.5; NCI_CGAP_Lu1; Human Pituitary, subtracted; Human Lung; NCI_CGAP_Ut3; Human Synovium; NCI_CGAP_Co9; Breast, Cancer: (4005522 A2); Patient #6 Acute Myeloid Leukemia/SGAH; B Cell lymphoma; NCI_CGAP_Co14; Human Osteosarcoma; Human Colon, re-excision; Human Adipose Tissue, re-excision; wilm's tumor; Spleen metastic melanoma; Breast, Cancer: (4004943 A5); Breast, Normal: (4005522B2); Brain Frontal Cortex, re-excision; NCI_CGAP_Ut1; NCI_CGAP_Kid6; Ovary, Cancer: (4004332 A2); Clontech human aorta polyA+ mRNA (#6572); Human Fetal Dura Mater; Ulcerative Colitis; Liver Normal Met5No; Human Gall Bladder; Human Liver, normal; Fetal Liver, subtraction II; Palate normal; Fetal Heart; Bone Marrow Stromal Cell, untreated; Colon, normal; Stomach Normal; Human Placenta; Pancreas normal PCA4 No; NCI_CGAP_Brn25; NCI_CGAP_Kid5; Human Bone Marrow, treated; Soares ovary tumor NbHOT; NCI_CGAP_LuS; Hodgkin's Lymphoma II; Soares_pregnant_uterus_NbHPU; Soares_NFL_T_GBC_S1; Soares_testis_NHT and NCI_CGAP_Ov39.

[0280] The tissue distribution indicates polynucleotides and polypeptides corresponding to this gene, as well as antibodies against those polypeptides, may be useful for the diagnosis, prevention, and/or treatment of immune system disorders; particularly immune cell proliferative disorders (e.g. leukemia), autoimmune disorders, and immunodeficiencies (including immunodeficiencies caused by genetic factors, microbial pathogens (e.g. HIV), chemotherapy, and radiation). See “Immune Activity” section, infra.

Features of Protein Encoded by Gene No: 77

[0281] This gene is expressed in the following tissues/cDNA libraries: Soares_fetal_liver_spleen_{—}1NFLS_S1 and to a lesser extent in NCI_CGAP_Brn25; Soares_testis_NHT; Soares_pregnant_uterus_NbHPU; NCI_CGAP_Kid12; Soares_senescent_fibroblasts_NbHSF; NCI_CGAP_Kid3; Human Fetal Brain, normalized CO; NCI_CGAP_Lu19; NCI_CGAP_Lu24; NCI_CGAP_Thyl; H. Kidney Cortex, subtracted; Breast, Normal: (4005522B2); Colon Tumor; NCI_CGAP_Kid6; NCI_CGAP_Gas4; Human Prostate Cancer, Stage B2, re-excision; NCI_CGAP_Br2; Human Chondrosarcoma; Soares adult brain N2b5HB55Y; Olfactory epithelium, nasalcavity; NCI_CGAP_Co3; NCI_CGAP_GC6; Pancreas Islet Cell Tumor; Spleen, Chronic lymphocytic leukemia; HM3; H. Frontal cortex, epileptic, re-excision; Human Endometrial Tumor; Keratinocyte; Soares_fetal_lung_NbHL19W; Colon Normal III; Soares_NFL_T_GBC_S1; Soares_fetal_heart_NbHH19W; Soares_NhHMPu_S1 and Soares fetal liver spleen 1NFLS.

[0282] The tissue distribution indicates polynucleotides and polypeptides corresponding to this gene would be useful for the diagnosis, prevention, and or treatment of liver disorders and cancers. For example, the protein can be used for the detection, treatment, and/or prevention of Wilson's disease, cirrhosis, fibrosis, bilirubin metabolism, hepatomegaly, cholestasis, liver cancer (for example, hepatoblastoma), jaundice, hepatitis (acuta and chronic) and liver metabolic diseases and conditions attributable to the differentiation of hepatocyte progenitor cells.

Features of Protein Encoded by Gene No: 78

[0283] The computer algorithm BLASTX has been used to determine that the translation product of this gene shares sequence homology with, as a non-limiting example, the sequence accessible through the following database accession no. sp|Q9UJM5|Q9UJM5 (all information available through the recited accession number is incorporated herein by reference) which is described therein as “DJ20N2.5 (NOVEL PROTEIN SIMILAR TO FUCOSIDASE, ALPHA-L-1, TISSUE (EC 3.2.1.51, ALPHA-L-FUCOSIDASE FUCOHYDROLASE)).” Based on the structural similarity these homologous polypeptides are expected to share at least some biological activities. Such activities are known in the art, some of which are described elsewhere herein. Assays for determining such activities are also known in the art, some of which have been described elsewhere herein. Preferred polypeptides of the invention comprise a polypeptide having the amino acid sequence set out in the sequence listing as SEQ ID NO: 441, SEQ ID NO: 442 and/or SEQ ID NO: 443.

[0284] This gene is expressed in the following tissues/cDNA libraries: Patient#2 Acute Myeloid Leukemia/SGAH; NTERA2+retinoic acid, 14 days; NTERA2 teratocarcinoma cell line+retinoic acid (14 days).

[0285] The tissue distribution indicates polynucleotides and polypeptides corresponding to this gene, as well as antibodies against those polypeptides, may be useful for the diagnosis, prevention, and/or treatment of immune system disorders; particularly immune cell proliferative disorders (e.g. leukemia), autoimmune disorders, and immunodeficiencies (including immunodeficiencies caused by genetic factors, microbial pathogens (e.g. HIV), chemotherapy, and radiation). See “Immune Activity” section, infra.

Features of Protein Encoded by Gene No: 79

[0286] The computer algorithm BLASTX has been used to determine that the translation product of this gene shares sequence homology with, as a non-limiting example, the sequence accessible through the following Genbank database accession no. sp|O75827|O75827 (all information available through the recited accession number is incorporated herein by reference) which is described therein as “DJ71L16.5 (KIAA0267 LIKE PUTATIVE NA(+)/H(+) EXCHANGER) (FRAGMENT). Based on the structural similarity these homologous polypeptides are expected to share at least some biological activities. Such activities are known in the art, some of which are described elsewhere herein. Assays for determining such activities are also known in the art, some of which have been described elsewhere herein. Preferred polypeptides of the invention comprise a polypeptide having the amino acid sequence set out in the sequence listing as SEQ ID NO: 444.

[0287] This gene is expressed in the following tissues/cDNA libraries: Soares_NhHMPu_S1 and to a lesser extent in Soares_pregnant_uterus_NbHPU; Soares_fetal_heart_NbHH19W; Soares_total_fetus_Nb2HF8_{—}9w; Soares_fetal_liver_spleen_{—}1NFLS_S1; Soares breast 3NbHBst; NCI_CGAP_Kid11; NCI_CGAP_GC6; Soares_fetal_lung_NbHL19W; Soares placenta Nb2HP; NCI_CGAP_CNS1; Larynx Carcinoma; Human Prostate BPH, re-excision; NCI_CGAP_Kid12; NCI_CGAP_Brn35; Early Stage Human Lung, subtracted; Human Tonsils, Lib 2; Human Osteoblasts II; CD40 activated monocyte dendridic cells; Human Adipose; Human blood platelets; Human Synovial Sarcoma; NTERA2, control; Soares_multiple_sclerosis_{—}2NbHMSP; Spleen, Chronic lymphocytic leukemia; Soares_parathyroid_tumor_NbHPA; NCI_CGAP_Sub4 and NCI_CGAP_Sub6.

[0288] The tissue distribution indicates polynucleotides and polypeptides corresponding to this gene, as well as antibodies against those polypeptides, may be useful for the diagnosis, prevention, and/or treatment of cancer and other hyperproliferative disorders (e.g., see “Hyperproliferative Disorders” section, infra). The tissue distribution also indicates polynucleotides and polypeptides corresponding to this gene, as well as antibodies against those polypeptides, may be useful for the diagnosis, prevention, and/or treatment of reproductive system disorders; particularly male and female infertility, placental and uterine disorders (e.g. endometriosis), and cancer of reproductive organs (e.g. testicular and ovarian cancer). See “Reproductive System Disorders” section, infra.

Features of Protein Encoded by Gene No: 80

[0289] This gene is expressed in Monocyte activated, re-excision.

[0290] The tissue distribution indicates polynucleotides and polypeptides corresponding to this gene, as well as antibodies against those polypeptides, may be useful for the diagnosis, prevention, and/or treatment of immune system disorders; particularly immune cell proliferative disorders (e.g. leukemia), autoimmune disorders, and immunodeficiencies (including immunodeficiencies caused by genetic factors, microbial pathogens (e.g. HIV), chemotherapy, and radiation). See “Immune Activity” section, infra.

Features of Protein Encoded by Gene No: 81

[0291] This gene is expressed in the following tissues/cDNA libraries: Soares_fetal_heart_NbHH19W and to a lesser extent in Soares melanocyte 2NbHM; NCI_CGAP_Lu19; Soares breast 3NbHBst; NCI_CGAP_GCB1; NCI_CGAP_Lu5; H. Frontal cortex, epileptic, re-excision; Nine Week Old Early Stage Human; Soares infant brain 1NIB; Breast, Cancer: (4004943 A5); NCI_CGAP_Kid11; NCI_CGAP_Brn25; NCI_CGAP_Kid3; Soares_parathyroid_tumor_NbHPA; H. Whole Brain #2, re-excision; NCI_CGAP_Co3; Palate carcinoma; Human Fetal Kidney, Reexcision; Pancreas Islet Cell Tumor; Soares_multiple_sclerosis_{—}2NbHMSP; Soares_placenta_{—}8 to 9 weeks_{—}2NbHP8 to 9W; Human Cerebellum; Soares_fetal_liver_spleen_{—}1NFLS_S1; Soares_NFL_T_GBC_S1; H. Adipose Tissue; Normalized infant brain, Bento Soares; Infant brain, Bento Soares; NCI_CGAP_Lu24; Soares retina N2b5HR; Frontal lobe, dementia, re-excision; NCI_CGAP_Ut4; Adenocarcinoma of Ovary, Human Cell Line; Hepatocellular Tumor, re-excision; Breast Cancer cell line, MDA 36; NCI_CGAP_Co10; Human Amygdala, re-excision; Human Osteoclastoma, re-excision; Soares adult brain N2b4HB55Y; HEL cell line; Ovarian Cancer; Human Infant Brain; Gessler Wilms tumor; Stratagene NT2 neuronal precursor 937230; TF-1 Cell Line GM-CSF Treated; TNFR degenerate oligo; Healing groin wound—zero hr post-incision (control); Ovary, Cancer: (15799A1F) Poorly differentiated carcinoma; NCI_CGAP_Pr28; B-Cells; Human Activated T-Cells, re-excision; Soares breast 2NbHBst; Soares adult brain N2b5HB55Y; Olfactory epithelium, nasalcavity; NCI_CGAP_Pan1; Human Gall Bladder; Bone Marrow Stromal Cell, untreated; Healing groin wound, 6.5 hours post incision; Ovarian Tumor Oct. 3, 1995; Rejected Kidney, lib 4; Early Stage Human Brain; CHME Cell Line, treated 5 hrs; Myoloid Progenitor Cell Line; Primary Dendritic cells, frac 2; Human Microvascular Endothelial Cells, fract. A; NCI_CGAP_Brn23; Human Bone Marrow, treated; Soares ovary tumor NbHOT; Bone Marrow Cell Line (RS4,11); Dendritic cells, pooled; normalized infant brain cDNA; Keratinocyte; Soares_fetal_lung_NbHL19W; Soares_total_fetus_Nb2HF8_{—}9w; Soares placenta Nb2HP; Soares fetal liver spleen 1NFLS; NCI_CGAP_Sar4 and NCI_CGAP_Sub6.

[0292] The tissue distribution indicates polynucleotides and polypeptides corresponding to this gene, as well as antibodies against those polypeptides, may be useful for the diagnosis, prevention, and/or treatment of cancer and other hyperproliferative disorders (e.g., see “Hyperproliferative Disorders” section, infra).

Features of Protein Encoded by Gene No: 82

[0293] The computer algorithm BLASTX has been used to determine that the translation product of this gene shares sequence homology with, as a non-limiting example, the sequence accessible through the following database accession no. pir|T00351|T00351 (all information available through the recited accession number is incorporated herein by reference). Based on the structural similarity these homologous polypeptides are expected to share at least some biological activities. Such activities are known in the art, some of which are described elsewhere herein. Assays for determining such activities are also known in the art, some of which have been described elsewhere herein. Preferred polypeptides of the invention comprise a polypeptide having the amino acid sequence set out in the sequence listing as SEQ ID NO: 445.

[0294] This gene is expressed in Myoloid Progenitor Cell Line.

[0295] The tissue distribution indicates polynucleotides and polypeptides corresponding to this gene, as well as antibodies against those polypeptides, may be useful for the diagnosis, prevention, and/or treatment of immune system disorders; particularly immune cell proliferative disorders (e.g. leukemia), autoimmune disorders, and immunodeficiencies (including immunodeficiencies caused by genetic factors, microbial pathogens (e.g. HIV), chemotherapy, and radiation). See “Immune Activity” section, infra.

Features of Protein Encoded by Gene No: 83

[0296] This gene is expressed in the following tissues/cDNA libraries: Monocyte activated; Soares_NhHMPu_S1 and to a lesser extent in H Macrophage (GM-CSF treated), re-excision; Primary Dendritic Cells, lib 1; Soares_testis_NHT; Macrophage-oxLDL; NCI_CGAP_CLL1; Macrophage (GM-CSF treated); NCI_CGAP_GC6; NCI_CGAP_Brn25; NCI_CGAP_Kid3; Soares melanocyte 2NbHM; Soares_pregnant_uterus_NbHPU; Soares_NFL_T_GBC_S1; NCI_CGAP_Lu26; Soares adult brain N2b4HB55Y; Monocyte activated, re-excision; CD40 activated monocyte dendridic cells; NCI_CGAP_Kid11; NCI_CGAP_GC4; Activated T-Cell (12 hs)/Thiouridine labelledEco; NCI_CGAP_Brn23; Soares ovary tumor NbHOT; Activated T-cell(12 h)/Thiouridine-re-excision; Soares placenta Nb2HP; Human Lung Cancer; Human Brain, striatum, re-excision; Human Astrocyte; Testis, normal; NCI_CGAP_Lu19; K562+PMA (36 hrs), re-excision; NCI_CGAP_Co16; HL-60, RA 4h, Subtracted; NCI_CGAP_HSC2; NCI_CGAP_Lu1; Human Tonsils, Lib 2; NCI_CGAP_Ut2; H. Kidney Medulla, re-excision; Gessler Wilms tumor; H. Epididiymus, caput & corpus; Colon Tumor; NCI_CGAP_Br2; Liver, Hepatoma; Human Rhabdomyosarcoma; Hemangiopericytoma; Human Activated T-Cells, re-excision; Epithelial-TNFa and INF induced; Human Whole Six Week Old Embryo; NCI_CGAP_Pan1; Macrophage-oxLDL, re-excision; Human adult testis, large inserts; CHME Cell Line, untreated; breast lymph node cDNA library; Human Adult Testes, Large Inserts, Reexcision; Colon Carcinoma; Human Synovial Sarcoma; Primary Dendritic cells, frac 2; Pancreas Islet Cell Tumor; Soares_multiple_sclerosis_{—}2NbHMSP; Human fetal heart, Lambda ZAP Express; HM3; Keratinocyte; Soares_total_fetus_Nb2HF8_{—}9w; Soares_fetal_heart_NbHH19W; NCI_CGAP_Ov18; NCI_CGAP_Sub3 and NCI_CGAP_Sub6.

[0297] The tissue distribution indicates polynucleotides and polypeptides corresponding to this gene, as well as antibodies against those polypeptides, may be useful for the diagnosis, prevention, and/or treatment of immune system disorders; particularly immune cell proliferative disorders (e.g. leukemia), autoimmune disorders, and immunodeficiencies (including immunodeficiencies caused by genetic factors, microbial pathogens (e.g. HIV), chemotherapy, and radiation). See “Immune Activity” section, infra.

TABLE 1A

| | | | | | | | | | 5′ NT | | | | | |
|---|---|---|---|---|---|---|---|---|---|---|---|---|---|---|
| | | | | | | | | | of | | First | Last | | |
| | | ATCC | | NT | | 5′ NT | 3′ NT | 5′ NT | First | AA | AA | AA | First | Last |
| | | Deposit | | SEQ | Total | of | of | of | AA of | SEQ | of | of | AA of | AA |
| | cDNA | No: Z and | | ID | NT | Clone | Clone | Start | Signal | ID | Sig | Sig | Secreted | of |
| Gene No. | Clone ID | Date | Vector | NO: X | Seq. | Seq. | Seq. | Codon | Pep | NO: Y | Pep | Pep | Portion | ORF |
| 1 | HAGAN08 | PTA-3101 | Uni-ZAP | 11 | 1172 | 306 | 1172 | 335 | 335 | 198 | 1 | 17 | 18 | 91 |
| | | Feb. 23, 2001 | XR | | | | | | | | | | | |
| 2 | HSANL54 | PTA-3103 | pSport1 | 12 | 1649 | 1 | 1649 | 296 | 296 | 199 | 1 | 22 | 23 | 49 |
| | | Feb. 23, 2001 | | | | | | | | | | | | |
| 2 | HSANL54 | PTA-3103 | pSport1 | 94 | 1116 | 1 | 1116 | 286 | 286 | 281 | 1 | 22 | 23 | 49 |
| | | Feb. 23, 2001 | | | | | | | | | | | | |
| 2 | HSANL54 | PTA-3103 | pSport1 | 95 | 724 | 198 | 724 | | 2 | 282 | 1 | 1 | 2 | 187 |
| | | Feb. 23, 2001 | | | | | | | | | | | | |
| 3 | HSYHY70 | PTA-3103 | pCMVSport | 13 | 1965 | 1 | 1965 | 59 | 59 | 200 | 1 | 17 | 18 | 95 |
| | | Feb. 23, 2001 | 3.0 | | | | | | | | | | | |
| 3 | HSYHY70 | PTA-3103 | pCMVSport | 96 | 636 | 1 | 636 | 46 | 46 | 283 | 1 | 17 | 18 | 95 |
| | | Feb. 23, 2001 | 3.0 | | | | | | | | | | | |
| 4 | HEOUO75 | PTA-3101 | pSport1 | 14 | 3371 | 1 | 3371 | 40 | 40 | 201 | 1 | 20 | 21 | 175 |
| | | Feb. 23, 2001 | | | | | | | | | | | | |
| 4 | HEOUO75 | PTA-3101 | pSport1 | 97 | 1204 | 44 | 1204 | 72 | 72 | 284 | 1 | 20 | 21 | 175 |
| | | Feb. 23, 2001 | | | | | | | | | | | | |
| 5 | HSCPC08 | PTA-3103 | pSport1 | 15 | 1214 | 1 | 1214 | 200 | 200 | 202 | 1 | 40 | 41 | 126 |
| | | Feb. 23, 2001 | | | | | | | | | | | | |
| 5 | HSCPC08 | PTA-3103 | pSport1 | 98 | 1117 | 1 | 1117 | 180 | 180 | 285 | 1 | 40 | 41 | 126 |
| | | Feb. 23, 2001 | | | | | | | | | | | | |
| 6 | HSCPT22 | PTA-3103 | pSport1 | 16 | 896 | 1 | 896 | 92 | 92 | 203 | 1 | 26 | 27 | 187 |
| | | Feb. 23, 2001 | | | | | | | | | | | | |
| 6 | HSCPT22 | PTA-3103 | pSport1 | 99 | 1092 | 1 | 1092 | 81 | 81 | 286 | 1 | 26 | 27 | 187 |
| | | Feb. 23, 2001 | | | | | | | | | | | | |
| 7 | HTLED86 | PTA-3103 | Uni-ZAP | 17 | 1299 | 1 | 1299 | 545 | 545 | 204 | 1 | 15 | 16 | 38 |
| | | Feb. 23, 2001 | XR | | | | | | | | | | | |
| 7 | HTLED86 | PTA-3103 | Uni-ZAP | 100 | 1450 | 678 | 1450 | 809 | 809 | 287 | 1 | 26 | 27 | 214 |
| | | Feb. 23, 2001 | XR | | | | | | | | | | | |
| 7 | HTLED86 | PTA-3103 | Uni-ZAP | 101 | 764 | 1 | 764 | | 1 | 288 | 1 | 8 | 9 | 254 |
| | | Feb. 23, 2001 | XR | | | | | | | | | | | |
| 8 | HTPKP89 | PTA-3103 | Uni-ZAP | 18 | 1796 | 1 | 1796 | 70 | 70 | 205 | 1 | 28 | 29 | 163 |
| | | Feb. 23, 2001 | XR | | | | | | | | | | | |
| 8 | HTPKP89 | PTA-3103 | Uni-ZAP | 102 | 880 | 1 | 880 | 61 | 61 | 289 | 1 | 28 | 29 | 221 |
| | | Feb. 23, 2001 | XR | | | | | | | | | | | |
| 9 | HSRFP52 | PTA-3103 | Uni-ZAP | 19 | 1881 | 13 | 1318 | 174 | 174 | 206 | 1 | 21 | 22 | 369 |
| | | Feb. 23, 2001 | XR | | | | | | | | | | | |
| 9 | HSRFP52 | PTA-3103 | Uni-ZAP | 103 | 1321 | 1 | 1321 | 169 | 169 | 290 | 1 | 21 | 22 | 135 |
| | | Feb. 23, 2001 | XR | | | | | | | | | | | |
| 9 | HSRFP52 | PTA-3103 | Uni-ZAP | 104 | 1558 | 361 | 994 | 72 | 72 | 291 | 1 | 1 | 2 | 295 |
| | | Feb. 23, 2001 | XR | | | | | | | | | | | |
| 10 | HDHEA83 | PTA-3101 | pCMVSport | 20 | 2618 | 1 | 2618 | 42 | 42 | 207 | 1 | 24 | 25 | 85 |
| | | Feb. 23, 2001 | 2.0 | | | | | | | | | | | |
| 10 | HDHEA83 | PTA-3101 | pCMVSport | 105 | 2079 | 1 | 2079 | 91 | 91 | 292 | 1 | 24 | 25 | 85 |
| | | Feb. 23, 2001 | 2.0 | | | | | | | | | | | |
| 10 | HDHEA83 | PTA-3101 | pCMVSport | 106 | 3144 | 822 | 1185 | | 166 | 293 | 1 | 1 | 2 | 196 |
| | | Feb. 23, 2001 | 2.0 | | | | | | | | | | | |
| 10 | HDHEA83 | PTA-3101 | pCMVSport | 107 | 843 | 1 | 843 | | 649 | 294 | 1 | 11 | 12 | 58 |
| | | Feb. 23, 2001 | 2.0 | | | | | | | | | | | |
| 11 | HFXBR92 | PTA-3101 | Lambda | 21 | 1549 | 1 | 1549 | 225 | 225 | 208 | 1 | 23 | 24 | 172 |
| | | Feb. 23, 2001 | ZAP II | | | | | | | | | | | |
| 11 | HFXBR92 | PTA-3101 | Lambda | 108 | 613 | 1 | 613 | 213 | 213 | 295 | 1 | 23 | 24 | 133 |
| | | Feb. 23, 2001 | ZAP II | | | | | | | | | | | |
| 11 | HFXBR92 | PTA-3101 | Lambda | 109 | 945 | 374 | 945 | | 341 | 296 | 1 | 1 | 2 | 74 |
| | | Feb. 23, 2001 | ZAP II | | | | | | | | | | | |
| 12 | HSYIH77 | PTA-3103 | pCMVSport | 22 | 3239 | 1 | 3239 | 62 | 62 | 209 | 1 | 45 | 46 | 829 |
| | | Feb. 23, 2001 | 3.0 | | | | | | | | | | | |
| 12 | HSYIH77 | PTA-3103 | pCMVSport | 110 | 450 | 1 | 450 | 50 | 50 | 297 | 1 | 45 | 46 | 133 |
| | | Feb. 23, 2001 | 3.0 | | | | | | | | | | | |
| 13 | HTAHS92 | PTA-3103 | Uni-ZAP | 23 | 1433 | 1 | 1433 | 65 | 65 | 210 | 1 | 21 | 22 | 108 |
| | | Feb. 23, 2001 | XR | | | | | | | | | | | |
| 13 | HTAHS92 | PTA-3103 | Uni-ZAP | 111 | 773 | 136 | 773 | 193 | 193 | 298 | 1 | 21 | 22 | 108 |
| | | Feb. 23, 2001 | XR | | | | | | | | | | | |
| 13 | HTAHS92 | PTA-3103 | Uni-ZAP | 112 | 830 | 1 | 830 | | 25 | 299 | 1 | 1 | 2 | 68 |
| | | Feb. 23, 2001 | XR | | | | | | | | | | | |
| 14 | HAROV59 | PTA-3101 | pCMVSport | 24 | 2517 | 1 | 2517 | 49 | 49 | 211 | 1 | 18 | 19 | 153 |
| | | Feb. 23, 2001 | 3.0 | | | | | | | | | | | |
| 14 | HAROV59 | PTA-3101 | pCMVSport | 113 | 646 | 1 | 646 | 39 | 39 | 300 | 1 | 18 | 19 | 194 |
| | | Feb. 23, 2001 | 3.0 | | | | | | | | | | | |
| 15 | HDCCG73 | PTA-3101 | pSport1 | 25 | 807 | 1 | 807 | 45 | 45 | 212 | 1 | 14 | 15 | 87 |
| | | Feb. 23, 2001 | | | | | | | | | | | | |
| 15 | HDCCG73 | PTA-3101 | pSport1 | 114 | 739 | 1 | 739 | 100 | 100 | 301 | 1 | 14 | 15 | 87 |
| | | Feb. 23, 2001 | | | | | | | | | | | | |
| 16 | HQAHD50 | PTA-3103 | pCMVSport | 26 | 554 | 1 | 554 | 184 | 184 | 213 | 1 | 39 | 40 | 90 |
| | | Feb. 23, 2001 | 3.0 | | | | | | | | | | | |
| 16 | HQAHD50 | PTA-3103 | pCMVSport | 115 | 529 | 1 | 529 | 157 | 157 | 302 | 1 | 39 | 40 | 90 |
| | | Feb. 23, 2001 | 3.0 | | | | | | | | | | | |
| 17 | HROBA16 | PTA-3103 | Uni-ZAP | 27 | 1319 | 1 | 1319 | 317 | 317 | 214 | 1 | 31 | 32 | 34 |
| | | Feb. 23, 2001 | XR | | | | | | | | | | | |
| 17 | HROBA16 | PTA-3103 | Uni-ZAP | 116 | 751 | 1 | 751 | 342 | 342 | 303 | 1 | 31 | 32 | 34 |
| | | Feb. 23, 2001 | XR | | | | | | | | | | | |
| 17 | HROBA16 | PTA-3103 | Uni-ZAP | 117 | 660 | 1 | 660 | | 322 | 304 | 1 | 1 | 2 | 47 |
| | | Feb. 23, 2001 | XR | | | | | | | | | | | |
| 18 | HTPJD12 | PTA-3103 | Uni-ZAP | 28 | 1487 | 1 | 1487 | 23 | 23 | 215 | 1 | 17 | 18 | 245 |
| | | Feb. 23, 2001 | XR | | | | | | | | | | | |
| 18 | HTPJD12 | PTA-3103 | Uni-ZAP | 118 | 1488 | 6 | 1488 | 21 | 21 | 305 | 1 | 17 | 18 | 245 |
| | | Feb. 23, 2001 | XR | | | | | | | | | | | |
| 19 | HHAWD13 | PTA-3101 | pCMVSport | 29 | 1889 | 1 | 1889 | 261 | 261 | 216 | 1 | 15 | 16 | 459 |
| | | Feb. 23, 2001 | 3.0 | | | | | | | | | | | |
| 19 | HHAWD13 | PTA-3101 | pCMVSport | 119 | 656 | 1 | 656 | 235 | 235 | 306 | 1 | 15 | 16 | 140 |
| | | Feb. 23, 2001 | 3.0 | | | | | | | | | | | |
| 20 | HISFI83 | PTA-3102 | pSport1 | 30 | 1192 | 1 | 1192 | 145 | 145 | 217 | 1 | 33 | 34 | 110 |
| | | Feb. 23, 2001 | | | | | | | | | | | | |
| 20 | HISFI83 | PTA-3102 | pSport1 | 120 | 1394 | 155 | 1394 | 287 | 287 | 307 | 1 | 33 | 34 | 110 |
| | | Feb. 23, 2001 | | | | | | | | | | | | |
| 21 | HISFV70 | PTA-3102 | pSport1 | 31 | 1162 | 1 | 1162 | 71 | 71 | 218 | 1 | 20 | 21 | 107 |
| | | Feb. 23, 2001 | | | | | | | | | | | | |
| 21 | HISFV70 | PTA-3102 | pSport1 | 121 | 1164 | 43 | 1164 | 99 | 99 | 308 | 1 | 20 | 21 | 107 |
| | | Feb. 23, 2001 | | | | | | | | | | | | |
| 22 | HNSAB41 | PTA-3102 | pSport1 | 32 | 2799 | 1 | 2799 | 221 | 221 | 219 | 1 | 35 | 36 | 428 |
| | | Feb. 23, 2001 | | | | | | | | | | | | |
| 22 | HNSAB41 | PTA-3102 | pSport1 | 122 | 2793 | 1 | 2793 | 206 | 206 | 309 | 1 | 35 | 36 | 251 |
| | | Feb. 23, 2001 | | | | | | | | | | | | |
| 23 | HOCNY94 | PTA-3103 | pSport1 | 33 | 1656 | 1 | 1656 | 100 | 100 | 220 | 1 | 25 | 26 | 124 |
| | | Feb. 23, 2001 | | | | | | | | | | | | |
| 23 | HOCNY94 | PTA-3103 | pSport1 | 123 | 511 | 1 | 511 | 86 | 86 | 310 | 1 | 25 | 26 | 124 |
| | | Feb. 23, 2001 | | | | | | | | | | | | |
| 24 | HAROG72 | PTA-3101 | pCMVSport | 34 | 2051 | 1 | 2051 | 230 | 230 | 221 | 1 | 31 | 32 | 87 |
| | | Feb. 23, 2001 | 3.0 | | | | | | | | | | | |
| 24 | HAROG72 | PTA-3101 | pCMVSport | 124 | 581 | 1 | 581 | 215 | 215 | 311 | 1 | 31 | 32 | 87 |
| | | Feb. 23, 2001 | 3.0 | | | | | | | | | | | |
| 25 | HDACT07 | PTA-3101 | pSport1 | 35 | 2053 | 1 | 2053 | 28 | 28 | 222 | 1 | 26 | 27 | 84 |
| | | Feb. 23, 2001 | | | | | | | | | | | | |
| 25 | HDACT07 | PTA-3101 | pSport1 | 125 | 1166 | 496 | 1166 | 513 | 513 | 312 | 1 | 26 | 27 | 84 |
| | | Feb. 23, 2001 | | | | | | | | | | | | |
| 26 | HLTIJ80 | PTA-3102 | Uni-ZAP | 36 | 576 | 1 | 576 | 111 | 111 | 223 | 1 | 22 | 23 | 76 |
| | | Feb. 23, 2001 | XR | | | | | | | | | | | |
| 26 | HLTIJ80 | PTA-3102 | Uni-ZAP | 126 | 692 | 1 | 692 | | 3 | 313 | 1 | 1 | 2 | 71 |
| | | Feb. 23, 2001 | XR | | | | | | | | | | | |
| 27 | HNTZG72 | PTA-3103 | pSport1 | 37 | 1290 | 1 | 1290 | 95 | 95 | 224 | 1 | 19 | 20 | 142 |
| | | Feb. 23, 2001 | | | | | | | | | | | | |
| 27 | HNTZG72 | PTA-3103 | pSport1 | 127 | 675 | 1 | 675 | 76 | 76 | 314 | 1 | 19 | 20 | 142 |
| | | Feb. 23, 2001 | | | | | | | | | | | | |
| 28 | HNUCE33 | PTA-3103 | pCMVSport | 38 | 1322 | 1 | 1322 | 341 | 341 | 225 | 1 | 30 | 31 | 84 |
| | | Feb. 23, 2001 | 3.0 | | | | | | | | | | | |
| 28 | HNUCE33 | PTA-3103 | pCMVSport | 128 | 3669 | 2413 | 3669 | 2743 | 2743 | 315 | 1 | 30 | 31 | 84 |
| | | Feb. 23, 2001 | 3.0 | | | | | | | | | | | |
| 29 | HODEM32 | PTA-3103 | Uni-ZAP | 39 | 1877 | 1 | 1877 | 399 | 399 | 226 | 1 | 22 | 23 | 88 |
| | | Feb. 23, 2001 | XR | | | | | | | | | | | |
| 29 | HODEM32 | PTA-3103 | Uni-ZAP | 129 | 667 | 1 | 667 | 387 | 387 | 316 | 1 | 22 | 23 | 88 |
| | | Feb. 23, 2001 | XR | | | | | | | | | | | |
| 30 | HPJHQ20 | PTA-3103 | Uni-ZAP | 40 | 2559 | 1 | 2559 | 70 | 70 | 227 | 1 | 24 | 25 | 127 |
| | | Feb. 23, 2001 | XR | | | | | | | | | | | |
| 30 | HPJHQ20 | PTA-3103 | Uni-ZAP | 130 | 561 | 1 | 561 | 57 | 57 | 317 | 1 | 24 | 25 | 127 |
| | | Feb. 23, 2001 | XR | | | | | | | | | | | |
| 31 | HQADO95 | PTA-3103 | pCMVSport | 41 | 2116 | 1 | 2116 | 122 | 122 | 228 | 1 | 23 | 24 | 83 |
| | | Feb. 23, 2001 | 3.0 | | | | | | | | | | | |
| 31 | HQADO95 | PTA-3103 | pCMVSport | 131 | 702 | 1 | 702 | 107 | 107 | 318 | 1 | 23 | 24 | 83 |
| | | Feb. 23, 2001 | 3.0 | | | | | | | | | | | |
| 32 | HTENS88 | PTA-3103 | Uni-ZAP | 42 | 1352 | 1 | 1352 | 233 | 233 | 229 | 1 | 21 | 22 | 114 |
| | | Feb. 23, 2001 | XR | | | | | | | | | | | |
| 32 | HTENS88 | PTA-3103 | Uni-ZAP | 132 | 483 | 1 | 483 | 226 | 226 | 319 | 1 | 21 | 22 | 86 |
| | | Feb. 23, 2001 | XR | | | | | | | | | | | |
| 32 | HTENS88 | PTA-3103 | Uni-ZAP | 133 | 748 | 1 | 748 | | 1 | 320 | 1 | 1 | 2 | 70 |
| | | Feb. 23, 2001 | XR | | | | | | | | | | | |
| 33 | HTLGC03 | PTA-3103 | Uni-ZAP | 43 | 1532 | 1 | 1532 | 264 | 264 | 230 | 1 | 20 | 21 | 81 |
| | | Feb. 23, 2001 | XR | | | | | | | | | | | |
| 33 | HTLGC03 | PTA-3103 | Uni-ZAP | 134 | 652 | 1 | 652 | 257 | 257 | 321 | 1 | 20 | 21 | 81 |
| | | Feb. 23, 2001 | XR | | | | | | | | | | | |
| 33 | HTLGC03 | PTA-3103 | Uni-ZAP | 135 | 3006 | 16 | 824 | | 2109 | 322 | 1 | | | 2 |
| | | Feb. 23, 2001 | XR | | | | | | | | | | | |
| 34 | HTLKQ55 | PTA-3103 | Uni-ZAP | 44 | 1300 | 1 | 1300 | 261 | 261 | 231 | 1 | 29 | 30 | 273 |
| | | Feb. 23, 2001 | XR | | | | | | | | | | | |
| 34 | HTLKQ55 | PTA-3103 | Uni-ZAP | 136 | 720 | 1 | 720 | 249 | 249 | 323 | 1 | 29 | 30 | 138 |
| | | Feb. 23, 2001 | XR | | | | | | | | | | | |
| 35 | HTOJF42 | PTA-3103 | Uni-ZAP | 45 | 2564 | 1 | 2564 | 96 | 96 | 232 | 1 | 21 | 22 | 112 |
| | | Feb. 23, 2001 | XR | | | | | | | | | | | |
| 35 | HTOJF42 | PTA-3103 | Uni-ZAP | 137 | 463 | 1 | 463 | 91 | 91 | 324 | 1 | 21 | 22 | 124 |
| | | Feb. 23, 2001 | XR | | | | | | | | | | | |
| 36 | HTPHC19 | PTA-3103 | Uni-ZAP | 46 | 2594 | 1 | 2594 | 225 | 225 | 233 | 1 | 25 | 26 | 82 |
| | | Feb. 23, 2001 | XR | | | | | | | | | | | |
| 36 | HTPHC19 | PTA-3103 | Uni-ZAP | 138 | 699 | 186 | 699 | 397 | 397 | 325 | 1 | 25 | 26 | 82 |
| | | Feb. 23, 2001 | XR | | | | | | | | | | | |
| 37 | HDPHG50 | PTA-3101 | pCMVSport | 47 | 2030 | 1 | 2030 | 200 | 200 | 234 | 1 | 42 | 43 | 136 |
| | | Feb. 23, 2001 | 3.0 | | | | | | | | | | | |
| 37 | HDPHG50 | PTA-3101 | pCMVSport | 139 | 950 | 1 | 950 | 205 | 205 | 326 | 1 | 37 | 38 | 248 |
| | | Feb. 23, 2001 | 3.0 | | | | | | | | | | | |
| 37 | HDPHG50 | PTA-3101 | pCMVSport | 140 | 2952 | 735 | 2952 | | 2773 | 327 | 1 | 19 | 20 | 27 |
| | | Feb. 23, 2001 | 3.0 | | | | | | | | | | | |
| 38 | HHEWS13 | PTA-3102 | pCMVSport | 48 | 1602 | 1 | 1602 | 420 | 420 | 235 | 1 | 38 | 39 | 47 |
| | | Feb. 23, 2001 | 3.0 | | | | | | | | | | | |
| 38 | HHEWS13 | PTA-3102 | pCMVSport | 141 | 776 | 1 | 776 | 410 | 410 | 328 | 1 | 36 | 37 | 51 |
| | | Feb. 23, 2001 | 3.0 | | | | | | | | | | | |
| 39 | HOGCY01 | PTA-3103 | pCMVSport | 49 | 508 | 1 | 508 | 141 | 141 | 236 | 1 | 37 | 38 | 122 |
| | | Feb. 23, 2001 | 2.0 | | | | | | | | | | | |
| 40 | HPJGT38 | PTA-3103 | Uni-ZAP | 50 | 612 | 1 | 612 | 6 | 6 | 237 | 1 | 43 | 44 | 90 |
| | | Feb. 23, 2001 | XR | | | | | | | | | | | |
| 41 | HTFMK11 | PTA-3103 | pSport1 | 51 | 2291 | 1 | 2291 | 429 | 429 | 238 | 1 | 25 | 26 | 33 |
| | | Feb. 23, 2001 | | | | | | | | | | | | |
| 41 | HTFMK11 | PTA-3103 | pSport1 | 142 | 702 | 1 | 702 | 476 | 476 | 329 | 1 | 25 | 26 | 33 |
| | | Feb. 23, 2001 | | | | | | | | | | | | |
| 41 | HTFMK11 | PTA-3103 | pSport1 | 143 | 798 | 1 | 798 | | 3 | 330 | 1 | 1 | 2 | 99 |
| | | Feb. 23, 2001 | | | | | | | | | | | | |
| 42 | HTSGQ95 | PTA-3103 | pBluescript | 52 | 2842 | 1 | 2842 | 88 | 88 | 239 | 1 | 23 | 24 | 35 |
| | | Feb. 23, 2001 | | | | | | | | | | | | |
| 42 | HTSGQ95 | PTA-3103 | pBluescript | 144 | 566 | 1 | 566 | 88 | 88 | 331 | 1 | 24 | 25 | 35 |
| | | Feb. 23, 2001 | | | | | | | | | | | | |
| 42 | HTSGQ95 | PTA-3103 | pBluescript | 145 | 1939 | 366 | 466 | | 1153 | 332 | 1 | 1 | 2 | 262 |
| | | Feb. 23, 2001 | | | | | | | | | | | | |
| 43 | HLSAI43 | PTA-3102 | pSport1 | 53 | 765 | 1 | 765 | 191 | 191 | 240 | 1 | 25 | 26 | 82 |
| | | Feb. 23, 2001 | | | | | | | | | | | | |
| 43 | HLSAI43 | PTA-3102 | pSport1 | 146 | 619 | 1 | 619 | 181 | 181 | 333 | 1 | 25 | 26 | 82 |
| | | Feb. 23, 2001 | | | | | | | | | | | | |
| 44 | HNBTF02 | PTA-3102 | pSport1 | 54 | 1896 | 1 | 1896 | 32 | 32 | 241 | 1 | 22 | 23 | 219 |
| | | Feb. 23, 2001 | | | | | | | | | | | | |
| 44 | HNBTF02 | PTA-3102 | pSport1 | 147 | 2032 | 140 | 2032 | 154 | 154 | 334 | 1 | 22 | 23 | 587 |
| | | Feb. 23, 2001 | | | | | | | | | | | | |
| 45 | HNSCC06 | PTA-3102 | pSport1 | 55 | 1876 | 1 | 1876 | 25 | 25 | 242 | 1 | 15 | 16 | 181 |
| | | Feb. 23, 2001 | | | | | | | | | | | | |
| 45 | HNSCC06 | PTA-3102 | pSport1 | 148 | 1048 | 1 | 1048 | 8 | 8 | 335 | 1 | 15 | 16 | 337 |
| | | Feb. 23, 2001 | | | | | | | | | | | | |
| 46 | HTENQ40 | PTA-3103 | Uni-ZAP | 56 | 1072 | 1 | 1072 | 84 | 84 | 243 | 1 | 44 | 45 | 125 |
| | | Feb. 23, 2001 | XR | | | | | | | | | | | |
| 46 | HTENQ40 | PTA-3103 | Uni-ZAP | 149 | 701 | 1 | 701 | 77 | 77 | 336 | 1 | 44 | 45 | 125 |
| | | Feb. 23, 2001 | XR | | | | | | | | | | | |
| 47 | HCNCM78 | PTA-3101 | Lambda | 57 | 652 | 1 | 652 | 34 | 34 | 244 | 1 | 24 | 25 | 132 |
| | | Feb. 23, 2001 | ZAP II | | | | | | | | | | | |
| 47 | HCNCM78 | PTA-3101 | Lambda | 150 | 617 | 1 | 617 | 24 | 24 | 337 | 1 | 24 | 25 | 132 |
| | | Feb. 23, 2001 | ZAP II | | | | | | | | | | | |
| 47 | HCNCM78 | PTA-3101 | Lambda | 151 | 881 | 76 | 881 | 55 | 55 | 338 | 1 | 24 | 25 | 81 |
| | | Feb. 23, 2001 | ZAP II | | | | | | | | | | | |
| 48 | HCOKD57 | PTA-3101 | pSport1 | 58 | 1352 | 1 | 1352 | 64 | 64 | 245 | 1 | 24 | 25 | 186 |
| | | Feb. 23, 2001 | | | | | | | | | | | | |
| 48 | HCOKD57 | PTA-3101 | pSport1 | 152 | 576 | 1 | 576 | 54 | 54 | 339 | 1 | 24 | 25 | 173 |
| | | Feb. 23, 2001 | | | | | | | | | | | | |
| 49 | HRAEO74 | PTA-3103 | pCMVSport | 59 | 1335 | 393 | 1335 | 545 | 545 | 246 | 1 | 22 | 23 | 114 |
| | | Feb. 23, 2001 | 3.0 | | | | | | | | | | | |
| 50 | HTACM88 | PTA-3103 | Uni-ZAP | 60 | 2140 | 1 | 2140 | 64 | 64 | 247 | 1 | 25 | 26 | 91 |
| | | Feb. 23, 2001 | XR | | | | | | | | | | | |
| 50 | HTACM88 | PTA-3103 | Uni-ZAP | 153 | 637 | 1 | 637 | 64 | 64 | 340 | 1 | 25 | 26 | 91 |
| | | Feb. 23, 2001 | XR | | | | | | | | | | | |
| 50 | HTACM88 | PTA-3103 | Uni-ZAP | 154 | 800 | 1 | 777 | | 332 | 341 | 1 | 1 | 2 | 139 |
| | | Feb. 23, 2001 | XR | | | | | | | | | | | |
| 51 | HBWBI44 | PTA-3101 | ZAP | 61 | 257 | 1 | 257 | 39 | 39 | 248 | 1 | 17 | 18 | 73 |
| | | Feb. 23, 2001 | Express | | | | | | | | | | | |
| 51 | HBWBI44 | PTA-3101 | ZAP | 155 | 684 | 1 | 684 | 425 | 425 | 342 | 1 | 17 | 18 | 86 |
| | | Feb. 23, 2001 | Express | | | | | | | | | | | |
| 52 | HAGIF61 | PTA-3101 | Uni-ZAP | 62 | 684 | 1 | 684 | 160 | 160 | 249 | 1 | 28 | 29 | 118 |
| | | Feb. 23, 2001 | XR | | | | | | | | | | | |
| 52 | HAGIF61 | PTA-3101 | Uni-ZAP | 156 | 1574 | 863 | 1574 | 1015 | 1015 | 343 | 1 | 28 | 29 | 118 |
| | | Feb. 23, 2001 | XR | | | | | | | | | | | |
| 53 | HSYHD12 | PTA-3103 | pCMVSport | 63 | 1977 | 1 | 1977 | 301 | 301 | 250 | 1 | 19 | 20 | 466 |
| | | Feb. 23, 2001 | 3.0 | | | | | | | | | | | |
| 53 | HSYHD12 | PTA-3103 | pCMVSport | 157 | 2050 | 30 | 2050 | 312 | 312 | 344 | 1 | 19 | 20 | 365 |
| | | Feb. 23, 2001 | 3.0 | | | | | | | | | | | |
| 54 | HTAGF12 | PTA-3103 | Uni-ZAP | 64 | 2632 | 1 | 2632 | 305 | 305 | 251 | 1 | 17 | 18 | 62 |
| | | Feb. 23, 2001 | XR | | | | | | | | | | | |
| 54 | HTAGF12 | PTA-3103 | Uni-ZAP | 158 | 638 | 1 | 638 | 298 | 298 | 345 | 1 | 17 | 18 | 62 |
| | | Feb. 23, 2001 | XR | | | | | | | | | | | |
| 54 | HTAGF12 | PTA-3103 | Uni-ZAP | 159 | 1332 | 81 | 792 | | 28 | 346 | 1 | 13 | 14 | 18 |
| | | Feb. 23, 2001 | XR | | | | | | | | | | | |
| 55 | HTHCA16 | PTA-3103 | Uni-ZAP | 65 | 1241 | 1 | 1241 | 77 | 77 | 252 | 1 | 20 | 21 | 306 |
| | | Feb. 23, 2001 | XR | | | | | | | | | | | |
| 55 | HTHCA16 | PTA-3103 | Uni-ZAP | 160 | 1267 | 41 | 1267 | 99 | 99 | 347 | 1 | 20 | 21 | 306 |
| | | Feb. 23, 2001 | XR | | | | | | | | | | | |
| 56 | HNFIQ15 | PTA-3102 | pBluescript | 66 | 1154 | 1 | 1111 | 105 | 105 | 253 | 1 | 26 | 27 | 191 |
| | | Feb. 23, 2001 | | | | | | | | | | | | |
| 56 | HNFIQ15 | PTA-3102 | pBluescript | 161 | 476 | 1 | 476 | 105 | 105 | 348 | 1 | 26 | 27 | 106 |
| | | Feb. 23, 2001 | | | | | | | | | | | | |
| 56 | HNFIQ15 | PTA-3102 | pBluescript | 162 | 1040 | 664 | 986 | | 417 | 349 | 1 | 1 | 2 | 137 |
| | | Feb. 23, 2001 | | | | | | | | | | | | |
| 56 | HNFIQ15 | PTA-3102 | pBluescript | 163 | 621 | 1 | 621 | | 255 | 350 | 1 | 1 | 2 | 102 |
| | | Feb. 23, 2001 | | | | | | | | | | | | |
| 57 | HNHPS28 | PTA-3102 | Uni-ZAP | 67 | 1077 | 1 | 1077 | 208 | 208 | 254 | 1 | 15 | 16 | 146 |
| | | Feb. 23, 2001 | XR | | | | | | | | | | | |
| 57 | HNHPS28 | PTA-3102 | Uni-ZAP | 164 | 601 | 1 | 601 | 201 | 201 | 351 | 1 | 15 | 16 | 133 |
| | | Feb. 23, 2001 | XR | | | | | | | | | | | |
| 58 | HNTDN59 | PTA-3102 | pCMVSport | 68 | 3067 | 1 | 3067 | 117 | 117 | 255 | 1 | 15 | 16 | 777 |
| | | Feb. 23, 2001 | 3.0 | | | | | | | | | | | |
| 58 | HNTDN59 | PTA-3102 | pCMVSport | 165 | 3337 | 1 | 3337 | 106 | 106 | 352 | 1 | 15 | 16 | 136 |
| | | Feb. 23, 2001 | 3.0 | | | | | | | | | | | |
| 58 | HNTDN59 | PTA-3102 | pCMVSport | 166 | 510 | 1 | 510 | 107 | 107 | 353 | 1 | 15 | 16 | 134 |
| | | Feb. 23, 2001 | 3.0 | | | | | | | | | | | |
| 58 | HNTDN59 | PTA-3102 | pCMVSport | 167 | 1367 | 682 | 1323 | | 1 | 354 | 1 | 1 | 2 | 303 |
| | | Feb. 23, 2001 | 3.0 | | | | | | | | | | | |
| 59 | HNTQM17 | PTA-3102 | pSport1 | 69 | 3453 | 1 | 3453 | 251 | 251 | 256 | 1 | 31 | 32 | 217 |
| | | Feb. 23, 2001 | | | | | | | | | | | | |
| 59 | HNTQM17 | PTA-3102 | pSport1 | 168 | 594 | 1 | 594 | 241 | 241 | 355 | 1 | 31 | 32 | 118 |
| | | Feb. 23, 2001 | | | | | | | | | | | | |
| 60 | HNTTF76 | PTA-3102 | pSport1 | 70 | 1109 | 1 | 1109 | 59 | 59 | 257 | 1 | 24 | 25 | 93 |
| | | Feb. 23, 2001 | | | | | | | | | | | | |
| 60 | HNTTF76 | PTA-3102 | pSport1 | 169 | 684 | 1 | 684 | 48 | 48 | 356 | 1 | 24 | 25 | 93 |
| | | Feb. 23, 2001 | | | | | | | | | | | | |
| 61 | HCFGD60 | PTA-3101 | pSport1 | 71 | 1158 | 1 | 1158 | 137 | 137 | 258 | 1 | 48 | 49 | 122 |
| | | Feb. 23, 2001 | | | | | | | | | | | | |
| 61 | HCFGD60 | PTA-3101 | pSport1 | 170 | 1494 | 378 | 1494 | 496 | 496 | 357 | 1 | 48 | 49 | 122 |
| | | Feb. 23, 2001 | | | | | | | | | | | | |
| 62 | HMUEP30 | PTA-3102 | pCMVSport | 72 | 1269 | 1 | 1269 | 251 | 251 | 259 | 1 | 42 | 43 | 113 |
| | | Feb. 23, 2001 | 3.0 | | | | | | | | | | | |
| 62 | HMUEP30 | PTA-3102 | pCMVSport | 171 | 610 | 1 | 610 | 241 | 241 | 358 | 1 | 42 | 43 | 95 |
| | | Feb. 23, 2001 | 3.0 | | | | | | | | | | | |
| 63 | HNSCA10 | PTA-3102 | pSport1 | 73 | 2911 | 1 | 2911 | 279 | 279 | 260 | 1 | 33 | 34 | 215 |
| | | Feb. 23, 2001 | | | | | | | | | | | | |
| 63 | HNSCA10 | PTA-3102 | pSport1 | 172 | 654 | 1 | 654 | 266 | 266 | 359 | 1 | 33 | 34 | 129 |
| | | Feb. 23, 2001 | | | | | | | | | | | | |
| 64 | HTPAO67 | PTA-3103 | Uni-ZAP | 74 | 5023 | 2522 | 5017 | 2709 | 2709 | 261 | 1 | 27 | 28 | 84 |
| | | Feb. 23, 2001 | XR | | | | | | | | | | | |
| 64 | HTPAO67 | PTA-3103 | Uni-ZAP | 173 | 2046 | 1392 | 2046 | 1579 | 1579 | 360 | 1 | 33 | 34 | 84 |
| | | Feb. 23, 2001 | XR | | | | | | | | | | | |
| 64 | HTPAO67 | PTA-3103 | Uni-ZAP | 174 | 1439 | 446 | 1433 | | 6 | 361 | 1 | 1 | 2 | 88 |
| | | Feb. 23, 2001 | XR | | | | | | | | | | | |
| 65 | HAZCB15 | PTA-3101 | pCMVSport | 75 | 1129 | 1 | 1129 | 32 | 32 | 262 | 1 | 22 | 23 | 116 |
| | | Feb. 23, 2001 | 3.0 | | | | | | | | | | | |
| 65 | HAZCB15 | PTA-3101 | pCMVSport | 175 | 675 | 1 | 675 | 7 | 7 | 362 | 1 | 22 | 23 | 116 |
| | | Feb. 23, 2001 | 3.0 | | | | | | | | | | | |
| 66 | HSLFK66 | PTA-3103 | Uni-ZAP | 76 | 1889 | 1 | 1889 | 167 | 167 | 263 | 1 | 39 | 40 | 139 |
| | | Feb. 23, 2001 | XR | | | | | | | | | | | |
| 66 | HSLFK66 | PTA-3103 | Uni-ZAP | 176 | 8446 | 2451 | 8446 | 2610 | 2610 | 363 | 1 | 39 | 40 | 139 |
| | | Feb. 23, 2001 | XR | | | | | | | | | | | |
| 67 | HCFPE46 | PTA-3101 | pSport1 | 77 | 845 | 1 | 845 | 151 | 151 | 264 | 1 | 18 | 19 | 82 |
| | | Feb. 23, 2001 | | | | | | | | | | | | |
| 67 | HCFPE46 | PTA-3101 | pSport1 | 177 | 730 | 1 | 730 | 140 | 140 | 364 | 1 | 18 | 19 | 82 |
| | | Feb. 23, 2001 | | | | | | | | | | | | |
| 68 | HNGPB91 | PTA-3102 | Uni-ZAP | 78 | 1799 | 1 | 1799 | 83 | 83 | 265 | 1 | 22 | 23 | 59 |
| | | Feb. 23, 2001 | XR | | | | | | | | | | | |
| 68 | HNGPB91 | PTA-3102 | Uni-ZAP | 178 | 621 | 1 | 621 | 70 | 70 | 365 | 1 | 22 | 23 | 59 |
| | | Feb. 23, 2001 | XR | | | | | | | | | | | |
| 68 | HNGPB91 | PTA-3102 | Uni-ZAP | 179 | 558 | 1 | 558 | 111 | 111 | 366 | 1 | 1 | 2 | 101 |
| | | Feb. 23, 2001 | XR | | | | | | | | | | | |
| 69 | HRADV31 | PTA-3103 | pCMVSport | 79 | 2463 | 1 | 2463 | 203 | 203 | 266 | 1 | 22 | 23 | 31 |
| | | Feb. 23, 2001 | 3.0 | | | | | | | | | | | |
| 69 | HRADV31 | PTA-3103 | pCMVSport | 180 | 1513 | 1 | 1513 | 188 | 188 | 367 | 1 | 22 | 23 | 31 |
| | | Feb. 23, 2001 | 3.0 | | | | | | | | | | | |
| 69 | HRADV31 | PTA-3103 | pCMVSport | 181 | 777 | 131 | 777 | | 54 | 368 | 1 | 1 | 2 | 118 |
| | | Feb. 23, 2001 | 3.0 | | | | | | | | | | | |
| 70 | HNBVG70 | PTA-3102 | pSport1 | 80 | 1168 | 1 | 1168 | 273 | 273 | 267 | 1 | 48 | 49 | 87 |
| | | Feb. 23, 2001 | | | | | | | | | | | | |
| 70 | HNBVG70 | PTA-3102 | pSport1 | 182 | 1909 | 721 | 1909 | 981 | 981 | 369 | 1 | 48 | 49 | 87 |
| | | Feb. 23, 2001 | | | | | | | | | | | | |
| 71 | HCFGK19 | PTA-3101 | pSport1 | 81 | 1707 | 1 | 1707 | 334 | 334 | 268 | 1 | 25 | 26 | 73 |
| | | Feb. 23, 2001 | | | | | | | | | | | | |
| 71 | HCFGK19 | PTA-3101 | pSport1 | 183 | 773 | 155 | 773 | 472 | 472 | 370 | 1 | 25 | 26 | 73 |
| | | Feb. 23, 2001 | | | | | | | | | | | | |
| 72 | HNGOG04 | PTA-3102 | Uni-ZAP | 82 | 1480 | 1 | 1480 | 27 | 27 | 269 | 1 | 21 | 22 | 81 |
| | | Feb. 23, 2001 | XR | | | | | | | | | | | |
| 72 | HNGOG04 | PTA-3102 | Uni-ZAP | 184 | 614 | 1 | 614 | 20 | 20 | 371 | 1 | 21 | 22 | 81 |
| | | Feb. 23, 2001 | XR | | | | | | | | | | | |
| 73 | HDCGC29 | PTA-3101 | pSport1 | 83 | 425 | 1 | 425 | 269 | 269 | 270 | 1 | 31 | 32 | 52 |
| | | Feb. 23, 2001 | | | | | | | | | | | | |
| 73 | HDCGC29 | PTA-3101 | pSport1 | 185 | 437 | 1 | 437 | 253 | 253 | 372 | 1 | 31 | 32 | 61 |
| | | Feb. 23, 2001 | | | | | | | | | | | | |
| 74 | HNGNT27 | PTA-3102 | Uni-ZAP | 84 | 1732 | 1 | 1732 | 61 | 61 | 271 | 1 | 24 | 25 | 83 |
| | | Feb. 23, 2001 | XR | | | | | | | | | | | |
| 74 | HNGNT27 | PTA-3102 | Uni-ZAP | 186 | 587 | 1 | 587 | 54 | 54 | 373 | 1 | 24 | 25 | 83 |
| | | Feb. 23, 2001 | XR | | | | | | | | | | | |
| 75 | HMUHD72 | PTA-3102 | pCMVSport | 85 | 2131 | 1 | 2131 | 168 | 168 | 272 | 1 | 26 | 27 | 84 |
| | | Feb. 23, 2001 | 3.0 | | | | | | | | | | | |
| 75 | HMUHD72 | PTA-3102 | pCMVSport | 187 | 1706 | 48 | 1706 | 204 | 204 | 374 | 1 | 26 | 27 | 84 |
| | | Feb. 23, 2001 | 3.0 | | | | | | | | | | | |
| 76 | HLYCK47 | PTA-3102 | pSport1 | 86 | 1143 | 1 | 1143 | 72 | 72 | 273 | 1 | 28 | 29 | 230 |
| | | Feb. 23, 2001 | | | | | | | | | | | | |
| 76 | HLYCK47 | PTA-3102 | pSport1 | 188 | 1150 | 56 | 1150 | 119 | 119 | 375 | 1 | 28 | 29 | 143 |
| | | Feb. 23, 2001 | | | | | | | | | | | | |
| 76 | HLYCK47 | PTA-3102 | pSport1 | 189 | 1233 | 45 | 1233 | 108 | 108 | 376 | 1 | 28 | 29 | 245 |
| | | Feb. 23, 2001 | | | | | | | | | | | | |
| 77 | HLYFJ90 | PTA-3102 | pSport1 | 87 | 641 | 1 | 641 | 230 | 230 | 274 | 1 | 23 | 24 | 83 |
| | | Feb. 23, 2001 | | | | | | | | | | | | |
| 77 | HLYFJ90 | PTA-3102 | pSport1 | 190 | 633 | 1 | 633 | 258 | 258 | 377 | 1 | 23 | 24 | 83 |
| | | Feb. 23, 2001 | | | | | | | | | | | | |
| 78 | HMLHD54 | PTA-3102 | pCMVSport | 88 | 1524 | 1 | 1524 | 75 | 75 | 275 | 1 | 28 | 29 | 91 |
| | | Feb. 23, 2001 | 3.0 | | | | | | | | | | | |
| 78 | HMLHD54 | PTA-3102 | pCMVSport | 191 | 705 | 42 | 705 | 102 | 102 | 378 | 1 | 28 | 29 | 91 |
| | | Feb. 23, 2001 | 3.0 | | | | | | | | | | | |
| 79 | HBPOM70 | PTA-3101 | Other | 89 | 1810 | 1 | 1810 | 374 | 374 | 276 | 1 | 37 | 38 | 336 |
| | | Feb. 23, 2001 | | | | | | | | | | | | |
| 79 | HBPOM70 | PTA-3101 | Other | 192 | 2901 | 1 | 2901 | 373 | 373 | 379 | 1 | 37 | 38 | 336 |
| | | Feb. 23, 2001 | | | | | | | | | | | | |
| 80 | HMSMO35 | PTA-3102 | Uni-ZAP | 90 | 1617 | 1 | 1617 | 407 | 407 | 277 | 1 | 20 | 21 | 106 |
| | | Feb. 23, 2001 | XR | | | | | | | | | | | |
| 80 | HMSMO35 | PTA-3102 | Uni-ZAP | 193 | 611 | 1 | 611 | 395 | 395 | 380 | 1 | 21 | 22 | 72 |
| | | Feb. 23, 2001 | XR | | | | | | | | | | | |
| 81 | HMUCI88 | PTA-3102 | pCMVSport | 91 | 758 | 1 | 758 | 239 | 239 | 278 | 1 | 20 | 21 | 131 |
| | | Feb. 23, 2001 | 3.0 | | | | | | | | | | | |
| 81 | HMUCI88 | PTA-3102 | pCMVSport | 194 | 3111 | 1593 | 3111 | 1815 | 1815 | 381 | 1 | 20 | 21 | 75 |
| | | Feb. 23, 2001 | 3.0 | | | | | | | | | | | |
| 82 | HMUDN51 | PTA-3102 | pCMVSport | 92 | 2152 | 1 | 2152 | 54 | 54 | 279 | 1 | 40 | 41 | 81 |
| | | Feb. 23, 2001 | 3.0 | | | | | | | | | | | |
| 82 | HMUDN51 | PTA-3102 | pCMVSport | 195 | 490 | 1 | 490 | 45 | 45 | 382 | 1 | 40 | 41 | 81 |
| | | Feb. 23, 2001 | 3.0 | | | | | | | | | | | |
| 83 | HMAGC36 | PTA-3102 | Uni-ZAP | 93 | 758 | 1 | 758 | 72 | 72 | 280 | 1 | 18 | 19 | 108 |
| | | Feb. 23, 2001 | XR | | | | | | | | | | | |
| 83 | HMAGC36 | PTA-3102 | Uni-ZAP | 196 | 1527 | 834 | 1527 | 898 | 898 | 383 | 1 | 18 | 19 | 117 |
| | | Feb. 23, 2001 | XR | | | | | | | | | | | |
| 83 | HMAGC36 | PTA-3102 | Uni-ZAP | 197 | 3746 | 1461 | 3746 | | 2544 | 384 | 1 | 10 | 11 | 167 |
| | | Feb. 23, 2001 | XR | | | | | | | | | | | |

[0298] TABLE 1B

| | | | | | | | | | |
|---|---|---|---|---|---|---|---|---|---|
| | | | | | AA | | Tissue Distribution | | |
| | | | | | SEQ | | Library code: count | | OMIM |
| Gene | Clone ID | Contig | SEQ ID | ORF | ID | | (see Table IV for | Cytologic | Disease |
| No: | NO: | ID: | NO: X | (From-To) | NO: Y | Predicted Epitopes | Library Codes) | Band | Reference(s): |

| | | | | | | | |
|---|---|---|---|---|---|---|---|
| 1 | HAGAN08 | 1212501 | 11 | 335-610 | 198 | Pro-56 to Leu-62, | S0010: 2, H0560: 1 and |
| | | | | | | Pro-86 to Asp-91. | H0445: 1. |
| 2 | HSANL54 | 1262040 | 12 | 296-445 | 199 | | S0358: 6, L0803: 6, |
| | | | | | | | L0794: 5, L0805: 5, |
| | | | | | | | L0748: 5, L0740: 5, |
| | | | | | | | H0144: 4, L0438: 4, |
| | | | | | | | L0741: 4, L0749: 4, |
| | | | | | | | H0556: 3, H0050: 3, |
| | | | | | | | H0617: 3, H0087: 3, |
| | | | | | | | L0769: 3, L0809: 3, |
| | | | | | | | L0439: 3, L0745: 3, |
| | | | | | | | L0747: 3, H0265: 2, |
| | | | | | | | H0583: 2, H0393: 2, |
| | | | | | | | H0013: 2, H0635: 2, |
| | | | | | | | H0545: 2, L0804: 2, |
| | | | | | | | L0789: 2, H0435: 2, |
| | | | | | | | H0521: 2, L0743: 2, |
| | | | | | | | L0756: 2, S0342: 1, |
| | | | | | | | H0254: 1, H0459: 1, |
| | | | | | | | S0420: 1, S0442: 1, |
| | | | | | | | S0354: 1, S0360: 1, |
| | | | | | | | S0045: 1, S0046: 1, |
| | | | | | | | H0645: 1, S0222: 1, |
| | | | | | | | H0610: 1, H0599: 1, |
| | | | | | | | H0706: 1, H0036: 1, |
| | | | | | | | S0474: 1, H0581: 1, |
| | | | | | | | H0327: 1, H0051: 1, |
| | | | | | | | H0083: 1, H0271: 1, |
| | | | | | | | H0135: 1, H0090: 1, |
| | | | | | | | H0616: 1, H0551: 1, |
| | | | | | | | L0351: 1, H0494: 1, |
| | | | | | | | H0026: 1, L0800: 1, |
| | | | | | | | L0643: 1, L0764: 1, |
| | | | | | | | L0662: 1, L0774: 1, |
| | | | | | | | L0651: 1, L0806: 1, |
| | | | | | | | L0655: 1, L0807: 1, |
| | | | | | | | L0659: 1, L5622: 1, |
| | | | | | | | L0663: 1, H0658: 1, |
| | | | | | | | H0539: 1, H0710: 1, |
| | | | | | | | H0555: 1, S3014: 1, |
| | | | | | | | S0027: 1, L0744: 1, |
| | | | | | | | S0436: 1, L0597: 1, |
| | | | | | | | L0485: 1, L0366: 1, |
| | | | | | | | S0026: 1, H0665: 1, |
| | | | | | | | H0542: 1, H0543: 1 and |
| | | | | | | | H0422: 1. |
| 1 | | 1213405 | 94 | 286-435 | 281 | | |
| | | 1191032 | 95 | 2-562 | 282 | | |
| 3 | HSYHY70 | 1268180 | 13 | 59-346 | 200 | Gln-48 to Cys-53, | H0556: 23, H0521: 12, |
| | | | | | | Cys-64 to Gly-70, | H0551: 10, H0265: 8, |
| | | | | | | Leu-78 to Ser-83. | H0692: 8, H0543: 8, |
| | | | | | | | S0418: 7, L0748: 7, |
| | | | | | | | H0542: 7, H0318: 6, |
| | | | | | | | H0560: 6, S3014: 6, |
| | | | | | | | H0445: 6, S0436: 6, |
| | | | | | | | L0665: 5, L0747: 5, |
| | | | | | | | H0423: 5, H0341: 4, |
| | | | | | | | H0617: 4, S0440: 4, |
| | | | | | | | L0769: 4, L0439: 4, |
| | | | | | | | L0740: 4, L0750: 4, |
| | | | | | | | L0595: 4, S0278: 3, |
| | | | | | | | H0052: 3, H0622: 3, |
| | | | | | | | H0135: 3, H0040: 3, |
| | | | | | | | S0144: 3, L5566: 3, |
| | | | | | | | L0768: 3, L0766: 3, |
| | | | | | | | L0775: 3, L0776: 3, |
| | | | | | | | H0547: 3, S0328: 3, |
| | | | | | | | S0206: 3, L0591: 3, |
| | | | | | | | L0608: 3, H0422: 3, |
| | | | | | | | H0170: 2, H0657: 2, |
| | | | | | | | H0484: 2, S0408: 2, |
| | | | | | | | S0045: 2, S0046: 2, |
| | | | | | | | H0599: 2, H0545: 2, |
| | | | | | | | H0050: 2, H0012: 2, |
| | | | | | | | H0620: 2, H0083: 2, |
| | | | | | | | H0284: 2, H0087: 2, |
| | | | | | | | H0488: 2, S0150: 2, |
| | | | | | | | L0640: 2, L0771: 2, |
| | | | | | | | L0773: 2, L0521: 2, |
| | | | | | | | L0363: 2, L0783: 2, |
| | | | | | | | L0383: 2, L0663: 2, |
| | | | | | | | L0438: 2, H0520: 2, |
| | | | | | | | L0751: 2, L0731: 2, |
| | | | | | | | L0757: 2, S0434: 2, |
| | | | | | | | L0596: 2, L0362: 2, |
| | | | | | | | T0002: 1, H0686: 1, |
| | | | | | | | S0040: 1, S0218: 1, |
| | | | | | | | H0583: 1, H0656: 1, |
| | | | | | | | S0180: 1, S0212: 1, |
| | | | | | | | H0483: 1, H0177: 1, |
| | | | | | | | H0125: 1, S0420: 1, |
| | | | | | | | S0356: 1, S0376: 1, |
| | | | | | | | S0444: 1, S0360: 1, |
| | | | | | | | H0208: 1, S0132: 1, |
| | | | | | | | S0476: 1, H0619: 1, |
| | | | | | | | H0393: 1, L0717: 1, |
| | | | | | | | H0586: 1, H0587: 1, |
| | | | | | | | H0642: 1, H0331: 1, |
| | | | | | | | H0256: 1, T0109: 1, |
| | | | | | | | H0013: 1, T0082: 1, |
| | | | | | | | S0182: 1, H0309: 1, |
| | | | | | | | T0110: 1, H0327: 1, |
| | | | | | | | H0544: 1, H0041: 1, |
| | | | | | | | S0051: 1, H0266: 1, |
| | | | | | | | H0290: 1, H0252: 1, |
| | | | | | | | H0328: 1, H0604: 1, |
| | | | | | | | H0031: 1, H0644: 1, |
| | | | | | | | H0628: 1, H0181: 1, |
| | | | | | | | H0606: 1, S0364: 1, |
| | | | | | | | H0068: 1, H0090: 1, |
| | | | | | | | H0616: 1, H0264: 1, |
| | | | | | | | H0412: 1, H0059: 1, |
| | | | | | | | S0038: 1, H0100: 1, |
| | | | | | | | L0351: 1, T0042: 1, |
| | | | | | | | H0494: 1, H0561: 1, |
| | | | | | | | L0065: 1, S0438: 1, |
| | | | | | | | H0509: 1, S0472: 1, |
| | | | | | | | H0647: 1, S0422: 1, |
| | | | | | | | S0002: 1, S0426: 1, |
| | | | | | | | L0500: 1, L0637: 1, |
| | | | | | | | L0772: 1, L0372: 1, |
| | | | | | | | L0645: 1, L0662: 1, |
| | | | | | | | L0364: 1, L0388: 1, |
| | | | | | | | L0774: 1, L0375: 1, |
| | | | | | | | L0805: 1, L0653: 1, |
| | | | | | | | L0655: 1, L0657: 1, |
| | | | | | | | L0559: 1, L0659: 1, |
| | | | | | | | L0526: 1, L0382: 1, |
| | | | | | | | L0809: 1, L0792: 1, |
| | | | | | | | L0666: 1, L0664: 1, |
| | | | | | | | H0144: 1, H0698: 1, |
| | | | | | | | H0699: 1, H0703: 1, |
| | | | | | | | H0435: 1, S0380: 1, |
| | | | | | | | H0522: 1, H0696: 1, |
| | | | | | | | S0028: 1, L0744: 1, |
| | | | | | | | L0754: 1, L0779: 1, |
| | | | | | | | L0758: 1, L0759: 1, |
| | | | | | | | L0593: 1, L0601: 1, |
| | | | | | | | S0011: 1, H0668: 1, |
| | | | | | | | S0276: 1 and S0424: 1. |
| | | 1225974 | 96 | 46-333 | 283 | Gln-48 to Cys-53, | |
| | | | | | | Cys-64 to Gly-70. | |
| 4 | HEOUO75 | 1283143 | 14 | 40-567 | 201 | Ser-19 to Met-38, | H0271: 15, L0667: 4, |
| | | | | | | Lys-53 to Asp-60, | H0179: 3, S0428: 3, |
| | | | | | | Leu-99 to Glu-105, | H0457: 2, H0416: 2, |
| | | | | | | Glu-112 to Pro-117, | S0052: 2, S0045: 1, |
| | | | | | | Lys-122 to Arg-130, | H0619: 1, H0041: 1, |
| | | | | | | Arg-166 to Ser-171. | H0050: 1, H0039: 1, |
| | | | | | | | T0023: 1, L0372: 1, |
| | | | | | | | L0805: 1, S0053: 1 and |
| | | | | | | | S0216: 1. |
| | | 1228107 | 97 | 72-599 | 284 | | |
| 5 | HSCPC08 | 1262036 | 15 | 200-580 | 202 | Pro-121 to Asp-126. | L0749: 3, S0222: 2, |
| | | | | | | | H0333: 1, H0181: 1, |
| | | | | | | | L0769: 1, L0761: 1, |
| | | | | | | | L0663: 1, L0665: 1, |
| | | | | | | | L0750: 1, L0779: 1, |
| | | | | | | | H0668: 1 and H0423: 1. |
| | | 1213061 | 98 | 180-560 | 285 | | |
| 6 | HSCPT22 | 1243895 | 16 | 92-655 | 203 | Thr-74 to Asn-79, | L0745: 2, H0616: 1, |
| | | | | | | Lys-115 to Asp-120. | L0758: 1 and H0668: 1. |
| | | 1209266 | 99 | 81-644 | 286 | Thr-74 to Asn-79, | |
| | | | | | | Lys-115 to Asp-120. | |
| 7 | HTLED86 | 1253125 | 17 | 545-661 | 204 | Cys-32 to Thr-38. | H0253: 6, L0758: 3, |
| | | | | | | | H0038: 2, L0774: 2, |
| | | | | | | | L0743: 2, L0749: 2, |
| | | | | | | | S0040: 1, H0661: 1, |
| | | | | | | | S0360: 1, S0007: 1, |
| | | | | | | | S6026: 1, H0351: 1, |
| | | | | | | | H0441: 1, H0485: 1, |
| | | | | | | | H0618: 1, H0087: 1, |
| | | | | | | | H0647: 1, L0800: 1, |
| | | | | | | | L0794: 1, L0766: 1, |
| | | | | | | | S0126: 1, H0658: 1, |
| | | | | | | | L0748: 1, L0745: 1, |
| | | | | | | | L0755: 1, L0759: 1 and |
| | | | | | | | L0697: 1. |
| 1 | | 1222077 | 100 | 809-1450 | 287 | His-31 to Gln-36, | |
| | | | | | | Ser-115 to Trp-124, | |
| | | | | | | Arg-168 to Ser-174. | |
| | | 1221659 | 101 | 1-762 | 288 | His-13 to Gln-18, | |
| | | | | | | Ser-97 to Trp-106. | |
| 8 | HTPKP89 | 1263310 | 18 | 70-561 | 205 | Pro-108 to Lys-113, | L0777: 7, L0748: 5, |
| | | | | | | Ile-157 to Arg-163. | L0750: 4, L0779: 3, |
| | | | | | | | L0805: 2, L0517: 2, |
| | | | | | | | L0439: 2, L0740: 2, |
| | | | | | | | L0747: 2, H0580: 1, |
| | | | | | | | S0010: 1, T0003: 1, |
| | | | | | | | H0622: 1, L0764: 1, |
| | | | | | | | H0144: 1, S3014: 1, |
| | | | | | | | L0749: 1 and L0758: 1. |
| | | 1213121 | 102 | 61-726 | 289 | Pro-108 to Lys-113, | |
| | | | | | | Ser-170 to Thr-176, | |
| | | | | | | Ala-190 to Ile-199. | |
| 9 | HSRFP52 | 1254537 | 19 | 174-1283 | 206 | Asp-55 to Gln-62, | AR055: 10, AR060: 5, |
| | | | | | | Thr-103 to Arg-108, | AR053: 5, AR052: 5, |
| | | | | | | Asp-160 to Ser-170, | AR033: 5, AR061: 4, |
| | | | | | | Arg-180 to Asn-186, | AR089: 4, AR096: 4, |
| | | | | | | Ala-193 to Ala-204, | AR104: 2 |
| | | | | | | Ala-222 to Pro-229, | S0022: 7, L0805: 3, |
| | | | | | | Gln-297 to Leu-304. | H0556: 2, H0046: 2, |
| | | | | | | | L0764: 2, L0662: 2, |
| | | | | | | | L0748: 2, H0305: 1, |
| | | | | | | | H0013: 1, H0050: 1, |
| | | | | | | | H0039: 1, H0040: 1, |
| | | | | | | | H0087: 1, T0042: 1, |
| | | | | | | | L0643: 1, L0794: 1, |
| | | | | | | | L0803: 1, L0804: 1, |
| | | | | | | | L0807: 1, L0809: 1, |
| | | | | | | | L0666: 1, H0144: 1, |
| | | | | | | | L0749: 1, L0779: 1 and |
| | | | | | | | L0758: 1. |
| 1 | | 745408 | 103 | 169-576 | 290 | Asp-55 to Gln-62, | |
| | | | | | | Pro-112 to Pro-118. | |
| | | 1182209 | 104 | 72-956 | 291 | Pro-17 to Gln-24, | |
| | | | | | | Asp-86 to Ser-96, | |
| | | | | | | Arg-106 to Asn-112, | |
| | | | | | | Ala-119 to Ala-130, | |
| | | | | | | Ala-148 to Pro-155, | |
| | | | | | | Gln-223 to Leu-230. | |
| 10 | HDHEA83 | 1243831 | 20 | 42-299 | 207 | Pro-65 to Ser-73. | L0439: 18, L0748: 15, |
| | | | | | | | L0758: 10, L0777: 9, |
| | | | | | | | L0803: 8, S0007: 7, |
| | | | | | | | H0046: 7, L0750: 7, |
| | | | | | | | S0356: 6, S0222: 5, |
| | | | | | | | L0742: 5, L0747: 5, |
| | | | | | | | L0731: 5, H0013: 4, |
| | | | | | | | S0010: 4, L0769: 4, |
| | | | | | | | L0794: 4, L0438: 3, |
| | | | | | | | H0539: 3, L0756: 3, |
| | | | | | | | L0757: 3, S0420: 2, |
| | | | | | | | S0360: 2, S6028: 2, |
| | | | | | | | L0770: 2, L0768: 2, |
| | | | | | | | L0775: 2, L0659: 2, |
| | | | | | | | L0789: 2, H0651: 2, |
| | | | | | | | L0754: 2, L0759: 2, |
| | | | | | | | L0599: 2, H0293: 2, |
| | | | | | | | S0116: 1, H0351: 1, |
| | | | | | | | H0438: 1, H0244: 1, |
| | | | | | | | H0599: 1, H0253: 1, |
| | | | | | | | H0581: 1, H0052: 1, |
| | | | | | | | H0546: 1, H0545: 1, |
| | | | | | | | H0178: 1, H0567: 1, |
| | | | | | | | H0570: 1, L0471: 1, |
| | | | | | | | H0051: 1, S0051: 1, |
| | | | | | | | T0010: 1, H0687: 1, |
| | | | | | | | H0622: 1, H0644: 1, |
| | | | | | | | H0124: 1, H0591: 1, |
| | | | | | | | H0634: 1, L0564: 1, |
| | | | | | | | L0762: 1, L0761: 1, |
| | | | | | | | L0646: 1, L0643: 1, |
| | | | | | | | L0771: 1, L0773: 1, |
| | | | | | | | L0662: 1, L0363: 1, |
| | | | | | | | L0649: 1, L0806: 1, |
| | | | | | | | L0807: 1, L0515: 1, |
| | | | | | | | L0783: 1, L0809: 1, |
| | | | | | | | L0792: 1, S0053: 1, |
| | | | | | | | H0144: 1, H0414: 1, |
| | | | | | | | H0660: 1, L0740: 1, |
| | | | | | | | L0745: 1, L0749: 1, |
| | | | | | | | L0780: 1, S0434: 1, |
| | | | | | | | S0436: 1, L0597: 1, |
| | | | | | | | L0588: 1, L0604: 1, |
| | | | | | | | L0601: 1, H0543: 1, |
| | | | | | | | H0423: 1 and H0422: 1. |
| 1 | | 1213580 | 105 | 91-348 | 292 | Pro-65 to Ser-73. | |
| 1 | | 1217946 | 106 | 166-753 | 293 | Thr-1 to Glu-13, | |
| | | | | | | Arg-135 to Asp-142, | |
| | | | | | | Pro-186 to Thr-193. | |
| | | 1209512 | 107 | 649-825 | 294 | | |
| 11 | HFXBR92 | 1243870 | 21 | 225-743 | 208 | Ser-50 to His-56, | L0471: 3, S0366: 2, |
| | | | | | | Glu-150 to Thr-160. | H0144: 2, L0002: 1, |
| | | | | | | | S0001: 1, H0619: 1, |
| | | | | | | | S0036: 1, L0750: 1 and |
| | | | | | | | L0604: 1. |
| 1 | | 1208739 | 108 | 213-611 | 295 | Ser-50 to His-56. | |
| | | 1046466 | 109 | 341-562 | 296 | Glu-16 to Gln-23, | |
| | | | | | | Pro-27 to Gly-34. | |
| 12 | HSYIH77 | 1276392 | 22 | 62-2551 | 209 | His-61 to Ala-69, | L0766: 5, L0779: 5, |
| | | | | | | Pro-76 to Tyr-85, | L0731: 4, S0358: 3, |
| | | | | | | His-98 to Cys-110, | L0770: 2, L0794: 2, |
| | | | | | | Thr-138 to Glu-145, | S0374: 2, L0747: 2, |
| | | | | | | Leu-386 to Glu-394, | L0749: 2, S0444: 1, |
| | | | | | | Glu-403 to Leu-408, | H0013: 1, H0575: 1, |
| | | | | | | Gly-427 to Trp-433, | H0581: 1, H0572: 1, |
| | | | | | | Asp-443 to Leu-450, | H0354: 1, H0622: 1, |
| | | | | | | Phe-462 to Val-469, | H0591: 1, H0551: 1, |
| | | | | | | Arg-513 to Val-520, | H0494: 1, S0440: 1, |
| | | | | | | Met-522 to Arg-527, | H0529: 1, L0796: 1, |
| | | | | | | Arg-560 to Phe-566, | L0773: 1, L0662: 1, |
| | | | | | | Gly-602 to Gly-608, | L0804: 1, L0659: 1, |
| | | | | | | Phe-632 to Asp-638, | L0790: 1, S0053: 1, |
| | | | | | | Leu-649 to Gly-658, | H0690: 1, H0648: 1, |
| | | | | | | Thr-677 to Thr-684, | H0672: 1, S0028: 1, |
| | | | | | | Asn-818 to Leu-826. | L0780: 1, S0434: 1, |
| | | | | | | | S0192: 1, H0543: 1 and |
| | | | | | | | H0423: 1. |
| | | 1209388 | 110 | 50-448 | 297 | | |
| 13 | HTAHS92 | 1243918 | 23 | 65-391 | 210 | Arg-24 to Cys-31, | H0436: 2, H0556: 1, |
| | | | | | | Pro-62 to Thr-73. | H0635: 1 and L0789: 1. |
| 1 | | 1213187 | 111 | 193-519 | 298 | Arg-24 to Cys-31, | |
| | | | | | | Pro-62 to Thr-73. | |
| | | 1042420 | 112 | 25-228 | 299 | Lys-6 to Ser-18. | |
| 14 | HAROV59 | 1272018 | 24 | 49-510 | 211 | Gly-44 to Tyr-50, | H0592: 2 |
| | | | | | | Pro-66 to Pro-77, | |
| | | | | | | Glu-96 to Gly-101, | |
| | | | | | | Ser-119 to Glu-136. | |
| | | 1209631 | 113 | 39-623 | 300 | Gly-44 to Tyr-50, | |
| | | | | | | Pro-66 to Pro-77, | |
| | | | | | | Glu-96 to Gly-101, | |
| | | | | | | Ser-119 to Glu-136, | |
| | | | | | | Thr-162 to Leu-167. | |
| 15 | HDCCG73 | 1243884 | 25 | 45-308 | 212 | Trp-42 to Gly-49. | H0637: 1 |
| | | 1209263 | 114 | 100-363 | 301 | Trp-42 to Gly-49. | |
| 16 | HQAHD50 | 1243837 | 26 | 184-456 | 213 | Met-1 to Met-6, | H0696: 1 |
| | | | | | | Pro-10 to Pro-15, | |
| | | | | | | Pro-49 to Val-56, | |
| | | | | | | Pro-59 to Ser-64, | |
| | | | | | | His-66 to Lys-73, | |
| | | | | | | Val-75 to Lys-81. | |
| | | 1209703 | 115 | 157-429 | 302 | Met-1 to Met-6, | |
| | | | | | | Pro-10 to Pro-15, | |
| | | | | | | Pro-49 to Val-56, | |
| | | | | | | Pro-59 to Ser-64, | |
| | | | | | | His-66 to Lys-73, | |
| | | | | | | Val-75 to Lys-81. | |
| 17 | HROBA16 | 1243878 | 27 | 317-421 | 214 | | H0598: 1 |
| 1 | | 1218577 | 116 | 342-446 | 303 | | |
| | | 1046802 | 117 | 322-462 | 304 | | |
| 18 | HTPJD12 | 1262048 | 28 | 23-760 | 215 | Glu-20 to Gly-25, | S0380: 5, L0748: 4, |
| | | | | | | Gly-27 to Trp-34, | H0648: 3, S0378: 3, |
| | | | | | | Gly-173 to Gly-178, | L0752: 3, L0766: 2, |
| | | | | | | Thr-199 to Thr-206, | L0803: 2, L0665: 2, |
| | | | | | | Leu-229 to Lys-242. | L0750: 2, 110661: 1, |
| | | | | | | | H0461: 1, H0270: 1, |
| | | | | | | | H0039: 1, H0622: 1, |
| | | | | | | | L0761: 1, L0657: 1, |
| | | | | | | | L0532: 1, L0666: 1, |
| | | | | | | | H0689: 1, S0330: 1, |
| | | | | | | | L0749: 1 and L0777: 1. |
| | | 1209268 | 118 | 21-758 | 305 | Glu-20 to Gly-25, | |
| | | | | | | Gly-27 to Trp-34, | |
| | | | | | | Gly-173 to Gly-178, | |
| | | | | | | Thr-199 to Thr-206, | |
| | | | | | | Leu-229 to Lys-242. | |
| 19 | HHAWD13 | 1272864 | 29 | 261-1640 | 216 | Asn-45 to Gly-51, | S0418: 1 |
| | | | | | | Arg-78 to Gly-84, | |
| | | | | | | Ser-127 to Glu-156, | |
| | | | | | | Asn-167 to Gly-178, | |
| | | | | | | Tyr-188 to Asn-193, | |
| | | | | | | Arg-242 to Arg-247, | |
| | | | | | | Lys-275 to Thr-282. | |
| | | 1209632 | 119 | 235-654 | 306 | Asn-45 to Gly-51, | |
| | | | | | | Arg-78 to Gly-84, | |
| | | | | | | Ser-127 to Ser-140. | |
| 20 | HISFI83 | 1243886 | 30 | 145-477 | 217 | Ile-38 to Leu-51, | H0124: 6, L0438: 6, |
| | | | | | | Tyr-89 to Phe-99. | L0758: 6, S0422: 4, |
| | | | | | | | L0754: 4, L0766: 3, |
| | | | | | | | L0803: 3, L0740: 3, |
| | | | | | | | L0779: 3, H0574: 2, |
| | | | | | | | L0763: 2, L0565: 2, |
| | | | | | | | S0328: 2, L0439: 2, |
| | | | | | | | L0777: 2, T0002: 1, |
| | | | | | | | H0583: 1, S0442: 1, |
| | | | | | | | S0360: 1, H0580: 1, |
| | | | | | | | S0132: 1, H0497: 1, |
| | | | | | | | H0036: 1, S0382: 1, |
| | | | | | | | L0800: 1, L0794: 1, |
| | | | | | | | L0774: 1, L0651: 1, |
| | | | | | | | L0783: 1, L0790: 1, |
| | | | | | | | L0666: 1, L0663: 1, |
| | | | | | | | L0665: 1, S0374: 1, |
| | | | | | | | H0658: 1, H0539: 1, |
| | | | | | | | H0555: 1, L0756: 1, |
| | | | | | | | L0731: 1, S0436: 1, |
| | | | | | | | S0452: 1 and H0352: 1. |
| | | 1209270 | 120 | 287-619 | 307 | Ile-38 to Leu-51, | |
| | | | | | | Tyr-89 to Phe-99. | |
| 21 | HISFV70 | 1253160 | 31 | 71-394 | 218 | Thr-18 to Gly-23, | H0539: 2, L0752: 2, |
| | | | | | | His-68 to Gly-90. | H0599: 1, S0366: 1, |
| | | | | | | | L0639: 1, L0664: 1, |
| | | | | | | | H0547: 1, S0330: 1, |
| | | | | | | | L0777: 1 and L0604: 1. |
| | | 1209259 | 121 | 99-422 | 308 | Thr-18 to Gly-23, | |
| | | | | | | His-68 to Gly-90. | |
| 22 | HNSAB41 | 1268184 | 32 | 221-1507 | 219 | Ala-33 to Gly-38, | L0373: 3, L0754: 3, |
| | | | | | | Ser-66 to Pro-76, | L0005: 2, S0354: 2, |
| | | | | | | Pro-149 to Glu-154, | H0331: 2, L0157: 2, |
| | | | | | | Arg-232 to Ala-251, | L0646: 2, L0803: 2, |
| | | | | | | Thr-262 to Asp-267, | L0659: 2, L0748: 2, |
| | | | | | | Ala-350 to Ser-363, | S0436: 2, L0581: 2, |
| | | | | | | Gly-371 to Leu-377, | H0170: 1, S0376: 1, |
| | | | | | | Val-381 to Ser-387, | H0574: 1, H0632: 1, |
| | | | | | | Val-406 to Ala-422. | H0590: 1, H0596: 1, |
| | | | | | | | H0046: 1, H0510: 1, |
| | | | | | | | S0214: 1, H0622: 1, |
| | | | | | | | H0644: 1, H0598: 1, |
| | | | | | | | S0440: 1, H0509: 1, |
| | | | | | | | L0598: 1, L0649: 1, |
| | | | | | | | S0406: 1, S0434: 1 and |
| | | | | | | | L0601: 1. |
| | | 1212804 | 122 | 206-961 | 309 | Ala-33 to Gly-38, | |
| | | | | | | Ser-66 to Pro-76, | |
| | | | | | | Pro-149 to Glu-154, | |
| | | | | | | Cys-237 to Glu-243. | |
| 23 | HOCNY94 | 1278041 | 33 | 100-474 | 220 | Pro-34 to Pro-40, | S0358: 2, S0442: 1, |
| | | | | | | Trp-59 to Ser-66, | S0444: 1, H0550: 1, |
| | | | | | | Pro-72 to Leu-77, | H0144: 1 and S0152: 1. |
| | | | | | | Pro-79 to Trp-85, | |
| | | | | | | Ile-90 to Gly-95, | |
| | | | | | | Thr-102 to Gly-110, | |
| | | | | | | Asp-118 to Pro-124. | |
| | | 1209024 | 123 | 86-460 | 310 | Pro-34 to Pro-40, | |
| | | | | | | Trp-59 to Ser-66, | |
| | | | | | | Pro-72 to Leu-77. | |
| 24 | HAROG72 | 1281478 | 34 | 230-490 | 221 | Ala-29 to Val-43, | L0809: 4, L0747: 4, |
| | | | | | | Gly-47 to Arg-56, | H0333: 2, H0716: 1, |
| | | | | | | Arg-62 to Cys-68. | H0589: 1, S0442: 1, |
| | | | | | | | S0300: 1, H0592: 1, |
| | | | | | | | H0123: 1, H0024: 1, |
| | | | | | | | H0090: 1, L0638: 1, |
| | | | | | | | L0637: 1, L0768: 1, |
| | | | | | | | L0794: 1, L0766: 1, |
| | | | | | | | L0649: 1, L0776: 1, |
| | | | | | | | L0657: 1, L0517: 1, |
| | | | | | | | L0666: 1, L0663: 1, |
| | | | | | | | S0328: 1, H0555: 1, |
| | | | | | | | L0750: 1, L0777: 1, |
| | | | | | | | L0755: 1, L0731: 1, |
| | | | | | | | L0759: 1 and H0422: 1. |
| | | 1209767 | 124 | 215-478 | 311 | Ala-29 to Val-43, | |
| | | | | | | Gly-47 to Arg-56, | |
| | | | | | | Arg-62 to Cys-68. | |
| 25 | HDACT07 | 1280454 | 35 | 28-282 | 222 | Pro-75 to Gln-83. | L0758: 9, L0769: 4, |
| | | | | | | | H0556: 3, L0756: 3, |
| | | | | | | | H0486: 2, H0156: 2, |
| | | | | | | | H0040: 2, H0529: 2, |
| | | | | | | | L0766: 2, L0803: 2, |
| | | | | | | | L0659: 2, L0809: 2, |
| | | | | | | | L0565: 2, L0748: 2, |
| | | | | | | | L0754: 2, L0777: 2, |
| | | | | | | | H0595: 2, L0595: 2, |
| | | | | | | | L0361: 2, S0358: 1, |
| | | | | | | | H0580: 1, H0587: 1, |
| | | | | | | | H0497: 1, H0013: 1, |
| | | | | | | | H0427: 1, H0581: 1, |
| | | | | | | | H0251: 1, H0046: 1, |
| | | | | | | | H0320: 1, H0594: 1, |
| | | | | | | | H0266: 1, H0031: 1, |
| | | | | | | | L0055: 1, H0634: 1, |
| | | | | | | | S0038: 1, H0100: 1, |
| | | | | | | | L0667: 1, L0771: 1, |
| | | | | | | | L0804: 1, L0776: 1, |
| | | | | | | | L5623: 1, L0791: 1, |
| | | | | | | | L0793: 1, L0665: 1, |
| | | | | | | | H0547: 1, H0519: 1, |
| | | | | | | | S0126: 1, H0682: 1, |
| | | | | | | | H0659: 1, H0539: 1, |
| | | | | | | | H0521: 1, S0404: 1, |
| | | | | | | | L0740: 1, L0747: 1, |
| | | | | | | | L0759: 1, S0436: 1 and |
| | | | | | | | L0591: 1. |
| | | 1209253 | 125 | 513-767 | 312 | Pro-75 to Gln-83. | |
| 26 | HLTIJ80 | 1034753 | 36 | 111-341 | 223 | Asn-31 to Leu-38. | H0591: 1 |
| | | 1046031 | 126 | 3-215 | 313 | | |
| 27 | HNTZG72 | 1246154 | 37 | 95-523 | 224 | Glu-137 to Asp-142. | S0418: 2 and H0547: 1. |
| | | 1209378 | 127 | 76-504 | 314 | Glu-137 to Asp-142. | |
| 28 | HNUCE33 | 1275160 | 38 | 341-595 | 225 | Lys-6 to Tyr-11. | L0439: 8, L0777: 6, |
| | | | | | | | L0749: 5, L0759: 5, |
| | | | | | | | S0360: 4, L0776: 4, |
| | | | | | | | L0438: 4, H0670: 4, |
| | | | | | | | L0624: 3, L0662: 3, |
| | | | | | | | L0803: 3, L0809: 3, |
| | | | | | | | S0378: 3, S0406: 3, |
| | | | | | | | L0758: 3, S0434: 3, |
| | | | | | | | S0442: 2, S0408: 2, |
| | | | | | | | H0428: 2, H0644: 2, |
| | | | | | | | L0766: 2, L4763: 2, |
| | | | | | | | L0666: 2, S0328: 2, |
| | | | | | | | H0696: 2, L0751: 2, |
| | | | | | | | L0599: 2, S0194: 2, |
| | | | | | | | S0196: 2, H0341: 1, |
| | | | | | | | H0661: 1, H0580: 1, |
| | | | | | | | H0392: 1, H0331: 1, |
| | | | | | | | H0427: 1, L0022: 1, |
| | | | | | | | H0318: 1, H0263: 1, |
| | | | | | | | H0123: 1, S0003: 1, |
| | | | | | | | H0615: 1, H0688: 1, |
| | | | | | | | H0038: 1, H0040: 1, |
| | | | | | | | H0413: 1, H0625: 1, |
| | | | | | | | S0438: 1, S0002: 1, |
| | | | | | | | S0426: 1, L0369: 1, |
| | | | | | | | L0637: 1, L0794: 1, |
| | | | | | | | L0650: 1, L0774: 1, |
| | | | | | | | L0659: 1, L0792: 1, |
| | | | | | | | L0664: 1, H0144: 1, |
| | | | | | | | H0697: 1, S0374: 1, |
| | | | | | | | H0547: 1, H0690: 1, |
| | | | | | | | H0682: 1, H0684: 1, |
| | | | | | | | H0659: 1, H0672: 1, |
| | | | | | | | H0651: 1, S0332: 1, |
| | | | | | | | H0521: 1, H0478: 1, |
| | | | | | | | S0390: 1, L0743: 1, |
| | | | | | | | L0740: 1, L0754: 1, |
| | | | | | | | L0750: 1, L0779: 1, |
| | | | | | | | L0752: 1, S0260: 1, |
| | | | | | | | H0445: 1, L0485: 1, |
| | | | | | | | L0608: 1, S0242: 1 and |
| | | | | | | | H0543: 1. |
| | | 1209149 | 128 | 2743-2997 | 315 | Lys-6 to Tyr-11. | |
| 29 | HODEM32 | 1253127 | 39 | 399-665 | 226 | His-24 to Phe-32, | H0615: 1 |
| | | | | | | Pro-59 to Gln-69. | |
| | | 1212873 | 129 | 387-653 | 316 | His-24 to Phe-32. | |
| 30 | HPJHQ20 | 1261918 | 40 | 70-453 | 227 | Trp-61 to Thr-67, | S0152: 1 |
| | | | | | | Ile-73 to Ser-84, | |
| | | | | | | Ser-87 to Ile-92. | |
| | | 1209298 | 130 | 57-440 | 317 | Trp-61 to Thr-67, | |
| | | | | | | Ile-73 to Ser-84, | |
| | | | | | | Ser-87 to Ile-92. | |
| 31 | HQADO95 | 1276422 | 41 | 122-373 | 228 | Pro-44 to Gln-49, | H0156: 1, H0696: 1 |
| | | | | | | Pro-52 to Ser-60. | and H0352: 1. |
| | | 1209746 | 131 | 107-358 | 318 | Pro-44 to Gln-49, | |
| | | | | | | Pro-52 to Ser-60. | |
| 32 | HTENS88 | 1243927 | 42 | 233-577 | 229 | Gln-27 to Ser-33, | L0766: 13, S0422: 8, |
| | | | | | | Thr-71 to Thr-80, | H0014: 2, S0440: 2, |
| | | | | | | Val-83 to Ser-98. | H0529: 2, L0751: 2, |
| | | | | | | | H0661: 1, H0637: 1, |
| | | | | | | | H0717: 1, H0587: 1, |
| | | | | | | | H0497: 1, H0486: 1, |
| | | | | | | | H0581: 1, H0052: 1, |
| | | | | | | | L0157: 1, S0003: 1, |
| | | | | | | | H0616: 1, L0598: 1, |
| | | | | | | | L0643: 1, L0768: 1, |
| | | | | | | | L0776: 1, L0663: 1, |
| | | | | | | | L0664: 1, H0144: 1, |
| | | | | | | | H0690: 1, H0670: 1, |
| | | | | | | | S0330: 1, S0380: 1, |
| | | | | | | | S0152: 1, S0404: 1, |
| | | | | | | | L0756: 1, L0779: 1, |
| | | | | | | | L0758: 1, S0308: 1, |
| | | | | | | | S0192: 1, H0422: 1, |
| | | | | | | | S0412: 1 and S0424: 1. |
| 1 | | 1213009 | 132 | 226-483 | 319 | Gln-27 to Ser-33. | |
| | | 1045824 | 133 | 1-210 | 320 | | |
| 33 | HTLGC03 | 1261928 | 43 | 264-509 | 230 | Gly-16 to Ala-22, | AR052: 14, AR055: |
| | | | | | | Ala-54 to Ala-62, | 10, AR060: 7, AR089: |
| | | | | | | Ser-69 to Ser-81. | 6, AR053: 6, AR061: |
| | | | | | | | 6, AR033: 5, AR096: |
| | | | | | | | 5, AR039: 3, AR104: 3 |
| | | | | | | | H0556: 4, L0646: 4, |
| | | | | | | | L0794: 4, H0253: 3, |
| | | | | | | | L0758: 3, H0618: 2, |
| | | | | | | | H0038: 2, H0040: 2, |
| | | | | | | | L0764: 2, L0776: 2, |
| | | | | | | | L0807: 2, L0809: 2, |
| | | | | | | | L0439: 2, L0751: 2, |
| | | | | | | | S0040: 1, H0341: 1, |
| | | | | | | | S0360: 1, H0734: 1, |
| | | | | | | | H0156: 1, H0309: 1, |
| | | | | | | | H0231: 1, H0012: 1, |
| | | | | | | | H0057: 1, H0355: 1, |
| | | | | | | | H0163: 1, H0090: 1, |
| | | | | | | | H0551: 1, S0038: 1, |
| | | | | | | | H0100: 1, L0640: 1, |
| | | | | | | | L0371: 1, L0667: 1, |
| | | | | | | | L0648: 1, L0768: 1, |
| | | | | | | | L0803: 1, L0806: 1, |
| | | | | | | | L0659: 1, L0789: 1, |
| | | | | | | | L0665: 1, H0690: 1, |
| | | | | | | | H0658: 1, H0672: 1, |
| | | | | | | | S0330: 1, S0406: 1, |
| | | | | | | | L0731: 1, L0757: 1, |
| | | | | | | | S0434: 1, S0436: 1, |
| | | | | | | | L0593: 1, H0422: 1, |
| | | | | | | | S0424: 1 and H0008: 1. |
| 1 | | 1212925 | 134 | 257-502 | 321 | Gly-16 to Ala-22. | |
| | | 1227183 | 135 | 2109-2117 | 322 | | |
| 34 | HTLKQ55 | 1243896 | 44 | 261-1082 | 231 | Glu-37 to Val-43, | H0618: 3 and H0253: |
| | | | | | | Gln-229 to Tyr-240, | 1. |
| | | | | | | Asp-250 to Gln-260. | |
| | | 1213423 | 136 | 249-665 | 323 | Glu-37 to Val-43. | |
| 35 | HTOJF42 | 1261944 | 45 | 96-434 | 232 | | H0656: 1, H0255: 1, |
| | | | | | | | H0264: 1, H0131: 1 and |
| | | | | | | | L0644: 1. |
| | | 1213137 | 137 | 91-462 | 324 | | |
| 36 | HTPHC19 | 1284768 | 46 | 225-473 | 233 | Ser-38 to Ser-44, | L0547: 2, H0635: 1, |
| | | | | | | Gly-67 to Lys-72. | H0622: 1, L0475: 1, |
| | | | | | | | H0727: 1 and H0721: 1. |
| | | 1212930 | 138 | 397-645 | 325 | Ser-38 to Ser-44. | |
| 37 | HDPHG50 | 1268191 | 47 | 200-610 | 234 | Gln-68 to Gly-73, | L0805: 3, H0521: 2, |
| | | | | | | Pro-99 to Ala-120, | H0735: 1, S0386: 1, |
| | | | | | | Asp-126 to Ser-136. | L0776: 1, L0438: 1, |
| | | | | | | | H0478: 1, L0439: 1 and |
| | | | | | | | S0436: 1. |
| 1 | | 1213570 | 139 | 205-948 | 326 | | |
| | | 1144654 | 140 | 2773-2856 | 327 | | |
| 38 | HHEWS13 | 1243859 | 48 | 420-563 | 235 | Thr-40 to Glu-47. | H0543: 1 |
| | | 1209615 | 141 | 410-565 | 328 | Tyr-40 to Ser-46. | |
| 39 | HOGCY01 | 1209803 | 49 | 141-506 | 236 | Asn-12 to Lys-19. | H0402: 2, L0766: 2, |
| | | | | | | | L0659: 2, S0212: 1, |
| | | | | | | | S0356: 1, L0769: 1, |
| | | | | | | | L5575: 1, L0800: 1, |
| | | | | | | | L0764: 1, L0794: 1, |
| | | | | | | | L0809: 1, L0789: 1, |
| | | | | | | | L4559: 1, L0438: 1, |
| | | | | | | | H0435: 1, L0439: 1 and |
| | | | | | | | L0758: 1. |
| 40 | HPJGT38 | 1209290 | 50 | 6-278 | 237 | Gln-59 to Pro-67. | |
| 41 | HTFMK11 | 1276752 | 51 | 429-530 | 238 | | H0624: 1, S0050: 1, |
| | | | | | | | S0051: 1, L0805: 1, |
| | | | | | | | L0748: 1, L0755: 1, |
| | | | | | | | L0588: 1 and S0424: 1. |
| 1 | | 1212928 | 142 | 476-577 | 329 | | |
| | | 1042907 | 143 | 3-299 | 330 | | |
| 42 | HTSGQ95 | 1280458 | 52 | 88-195 | 239 | | H0521: 6, H0587: 2, |
| | | | | | | | H0087: 2, S0404: 2, |
| | | | | | | | H0685: 1, H0657: 1, |
| | | | | | | | H0661: 1, H0580: 1, |
| | | | | | | | S0222: 1, H0592: 1, |
| | | | | | | | L0483: 1, H0628: 1, |
| | | | | | | | H0129: 1, S0144: 1, |
| | | | | | | | H0529: 1, L0761: 1, |
| | | | | | | | L0766: 1, L0774: 1, |
| | | | | | | | L0657: 1, L0791: 1, |
| | | | | | | | L0793: 1, H0698: 1, |
| | | | | | | | L0438: 1, H0547: 1, |
| | | | | | | | L0731: 1, S0436: 1 and |
| | | | | | | | H0543: 1. |
| 1 | | 1213625 | 144 | 88-195 | 331 | | |
| | | 1226328 | 145 | 1153-1938 | 332 | Gln-11 to Gln-17, | |
| | | | | | | Glu-68 to Gly-81, | |
| | | | | | | Ala-111 to Ala-117, | |
| | | | | | | Gly-146 to Gln-153. | |
| 43 | HLSAI43 | 1243888 | 53 | 191-439 | 240 | Lys-36 to Arg-41, | H0306: 1 and H0540: 1. |
| | | | | | | Gly-53 to Asp-67. | |
| | | 1213409 | 146 | 181-429 | 333 | Lys-36 to Arg-41, | |
| | | | | | | Gly-53 to Asp-67. | |
| 44 | HNBTF02 | 1253163 | 54 | 32-691 | 241 | Pro-49 to Pro-70, | L0758: 7, L0666: 5, |
| | | | | | | Gly-115 to Ser-121, | L0749: 4, L0779: 4, |
| | | | | | | Ala-133 to Arg-138, | H0620: 3, L0540: 3, |
| | | | | | | Glu-168 to Phe-175. | L0439: 3, L0750: 3, |
| | | | | | | | L0731: 3, L0759: 3, |
| | | | | | | | S0360: 2, L0763: 2, |
| | | | | | | | L0770: 2, L0803: 2, |
| | | | | | | | L0775: 2, L0805: 2, |
| | | | | | | | L0776: 2, L0665: 2, |
| | | | | | | | L0743: 2, L0747: 2, |
| | | | | | | | L0756: 2, S0040: 1, |
| | | | | | | | H0662: 1, S0045: 1, |
| | | | | | | | H0549: 1, H0550: 1, |
| | | | | | | | H0370: 1, T0060: 1, |
| | | | | | | | L0022: 1, H0572: 1, |
| | | | | | | | H0615: 1, H0135: 1, |
| | | | | | | | H0488: 1, H0623: 1, |
| | | | | | | | H0059: 1, H0022: 1, |
| | | | | | | | L0520: 1, L0640: 1, |
| | | | | | | | L0769: 1, L0772: 1, |
| | | | | | | | L0662: 1, L0768: 1, |
| | | | | | | | L0766: 1, L0804: 1, |
| | | | | | | | L0774: 1, L0655: 1, |
| | | | | | | | L0809: 1, L4501: 1, |
| | | | | | | | L0663: 1, L0664: 1, |
| | | | | | | | H0144: 1, H0547: 1, |
| | | | | | | | S0330: 1, H0539: 1, |
| | | | | | | | H0696: 1, L0744: 1, |
| | | | | | | | L0748: 1, L0751: 1 and |
| | | | | | | | L0757: 1. |
| | | 1226356 | 147 | 154-1917 | 334 | Pro-49 to Pro-70, | |
| | | | | | | Gly-115 to Ser-121, | |
| | | | | | | Ala-133 to Arg-138, | |
| | | | | | | Glu-168 to Phe-175, | |
| | | | | | | Pro-276 to Val-282, | |
| | | | | | | Thr-297 to Asp-305, | |
| | | | | | | Thr-403 to Gly-408, | |
| | | | | | | Ser-494 to Gln-502, | |
| | | | | | | Pro-539 to Arg-547. | |
| 45 | HNSCC06 | 1263307 | 55 | 25-570 | 242 | Ala-60 to Trp-66, | L0766: 2, H0265: 1, |
| | | | | | | Lys-86 to His-99, | H0717: 1, S0046: 1, |
| | | | | | | Asp-104 to Leu-111. | H0574: 1, H0590: 1, |
| | | | | | | | H0581: 1, H0594: 1, |
| | | | | | | | H0031: 1, H0090: 1, |
| | | | | | | | H0264: 1, L0774: 1, |
| | | | | | | | H0519: 1, H0435: 1, |
| | | | | | | | S0152: 1, L0752: 1, |
| | | | | | | | S0434: 1 and H0677: 1. |
| | | 1209025 | 148 | 8-1021 | 335 | Ala-60 to Trp-66, | |
| | | | | | | Lys-86 to His-99, | |
| | | | | | | Asp-104 to Leu-111. | |
| 46 | HTENQ40 | 1243926 | 56 | 84-461 | 243 | Ser-75 to Met-81. | H0616: 1 |
| | | 1213048 | 149 | 77-454 | 336 | Ser-75 to Met-81. | |
| 47 | HCNCM78 | 1243864 | 57 | 34-432 | 244 | Thr-22 to Cys-40, | L0771: 9, S0358: 7, |
| | | | | | | Val-44 to Asn-51, | L0764: 5, S0374: 3, |
| | | | | | | Pro-72 to Pro-81, | L0751: 3, H0597: 2, |
| | | | | | | His-93 to His-99, | L0804: 2, L0806: 2, |
| | | | | | | Gln-112 to Ser-117, | L0789: 2, S0406: 2, |
| | | | | | | Thr-120 to Cys-132. | S0442: 1, S0354: 1, |
| | | | | | | | S0444: 1, S0408: 1, |
| | | | | | | | H0587: 1, H0232: 1, |
| | | | | | | | L0738: 1, H0512: 1, |
| | | | | | | | S0440: 1, L0773: 1, |
| | | | | | | | L4500: 1, L0803: 1, |
| | | | | | | | L0664: 1, S0330: 1 and |
| | | | | | | | S0044: 1. |
| 1 | | 1225879 | 150 | 24-422 | 337 | Thr-22 to Cys-40, | |
| | | | | | | Val-44 to Asn-51, | |
| | | | | | | Pro-72 to Pro-81, | |
| | | | | | | His-93 to His-99, | |
| | | | | | | Gln-112 to Ser-117, | |
| | | | | | | Thr-120 to Cys-132. | |
| | | 1225880 | 151 | 55-300 | 338 | Thr-22 to Cys-40, | |
| | | | | | | Val-44 to His-56. | |
| 48 | HCOKD57 | 1271607 | 58 | 64-624 | 245 | Ser-37 to Thr-42, | AR039: 8, AR053: 6, |
| | | | | | | Cys-66 to Ser-71, | AR089: 5, AR033: 5, |
| | | | | | | Cys-87 to Asp-101, | AR052: 5, AR060: 4, |
| | | | | | | Ile-142 to Thr-149, | AR096: 4, AR055: 3, |
| | | | | | | Cys-176 to His-184. | AR104: 3, AR061: 3 |
| | | | | | | | L0750: 5, L0777: 4, |
| | | | | | | | L0776: 2, S0406: 2, |
| | | | | | | | L0751: 2, L0747: 2, |
| | | | | | | | L0758: 2, H0159: 1, |
| | | | | | | | H0294: 1, S0114: 1, |
| | | | | | | | H0636: 1, H0489: 1, |
| | | | | | | | S0007: 1, H0619: 1, |
| | | | | | | | H0431: 1, L0251: 1, |
| | | | | | | | T0114: 1, H0013: 1, |
| | | | | | | | H0327: 1, H0009: 1, |
| | | | | | | | H0012: 1, H0083: 1, |
| | | | | | | | S0003: 1, H0039: 1, |
| | | | | | | | H0598: 1, S0344: 1, |
| | | | | | | | S0422: 1, L0769: 1, |
| | | | | | | | L0764: 1, L0768: 1, |
| | | | | | | | L0775: 1, L0512: 1, |
| | | | | | | | L0783: 1, S0428: 1, |
| | | | | | | | S0126: 1, H0659: 1, |
| | | | | | | | H0648: 1, L0779: 1, |
| | | | | | | | L0752: 1, L0731: 1, |
| | | | | | | | L0757: 1 and H0667: 1. |
| | | 1213043 | 152 | 54-575 | 339 | Ser-37 to Thr-42, | |
| | | | | | | Cys-66 to Ser-71, | |
| | | | | | | Cys-87 to Asp-101, | |
| | | | | | | Thr-122 to Thr-127. | |
| 49 | HRAEO74 | 1209635 | 59 | 545-889 | 246 | Asp-42 to Glu-52, | H0617: 7, L0771: 6, |
| | | | | | | Asp-103 to Ser-114. | S0408: 4, S0358: 3, |
| | | | | | | | H0638: 2, L0761: 2, |
| | | | | | | | L0764: 2, L0655: 2, |
| | | | | | | | L0634: 2, L0666: 2, |
| | | | | | | | H0435: 2, L0751: 2, |
| | | | | | | | L0777: 2, H0506: 2, |
| | | | | | | | H0650: 1, H0254: 1, |
| | | | | | | | H0255: 1, S0444: 1, |
| | | | | | | | H0351: 1, H0549: 1, |
| | | | | | | | H0600: 1, H0592: 1, |
| | | | | | | | L0022: 1, H0744: 1, |
| | | | | | | | H0204: 1, H0231: 1, |
| | | | | | | | S0440: 1, L0800: 1, |
| | | | | | | | L0643: 1, L0648: 1, |
| | | | | | | | L0662: 1, L0776: 1, |
| | | | | | | | L0664: 1, S0216: 1, |
| | | | | | | | H0690: 1, H0672: 1, |
| | | | | | | | S0378: 1, S0406: 1, |
| | | | | | | | H0555: 1, L0747: 1 and |
| | | | | | | | S0436: 1. |
| 50 | HTACM88 | 1253076 | 60 | 64-339 | 247 | Pro-45 to Ala-54. | H0271: 14, L0757: 9, |
| | | | | | | | S0428: 5, L0659: 4, |
| | | | | | | | S0216: 4, L0751: 4, |
| | | | | | | | S0360: 3, L0776: 3, |
| | | | | | | | H0416: 2, H0068: 2, |
| | | | | | | | L0763: 2, L0772: 2, |
| | | | | | | | L0764: 2, L0662: 2, |
| | | | | | | | L0775: 2, L0438: 2, |
| | | | | | | | H0521: 2, H0671: 1, |
| | | | | | | | H0638: 1, S0442: 1, |
| | | | | | | | S0408: 1, T0039: 1, |
| | | | | | | | H0069: 1, H0635: 1, |
| | | | | | | | H0581: 1, H0421: 1, |
| | | | | | | | H0719: 1, L0483: 1, |
| | | | | | | | L0055: 1, H0634: 1, |
| | | | | | | | H0413: 1, L0646: 1, |
| | | | | | | | L0642: 1, L0773: 1, |
| | | | | | | | L0806: 1, L0789: 1, |
| | | | | | | | L0666: 1, S0052: 1, |
| | | | | | | | S0053: 1, H0689: 1, |
| | | | | | | | H0690: 1, H0518: 1 and |
| | | | | | | | L0439: 1. |
| 1 | | 1213431 | 153 | 64-339 | 340 | Pro-45 to Ala-54. | |
| | | 1228352 | 154 | 332-748 | 341 | | |
| 51 | HBWBI44 | 1277904 | 61 | 39-257 | 248 | | S0386: 1 and L0776: 1. |
| | | 1159379 | 155 | 425-682 | 342 | | |
| 52 | HAGIF61 | 1243855 | 62 | 160-516 | 249 | Ser-29 to Pro-43, | L0747: 7, L0761: 6, |
| | | | | | | Phe-55 to Gln-66, | H0052: 5, S0358: 4, |
| | | | | | | Thr-86 to His-93. | S0360: 4, L0752: 3, |
| | | | | | | | L0592: 3, L0411: 2, |
| | | | | | | | L0639: 2, L0627: 2, |
| | | | | | | | L0803: 2, L0805: 2, |
| | | | | | | | L0664: 2, L0665: 2, |
| | | | | | | | S0328: 2, H0710: 2, |
| | | | | | | | L0605: 2, H0423: 2, |
| | | | | | | | H0556: 1, H0583: 1, |
| | | | | | | | S0116: 1, H0663: 1, |
| | | | | | | | S0354: 1, H0340: 1, |
| | | | | | | | T0114: 1, T0109: 1, |
| | | | | | | | L0021: 1, S0346: 1, |
| | | | | | | | H0194: 1, H0251: 1, |
| | | | | | | | T0010: 1, S0022: 1, |
| | | | | | | | H0135: 1, H0494: 1, |
| | | | | | | | H0646: 1, H0649: 1, |
| | | | | | | | L0373: 1, L0646: 1, |
| | | | | | | | L0662: 1, L0794: 1, |
| | | | | | | | L0766: 1, L0649: 1, |
| | | | | | | | L0775: 1, L0651: 1, |
| | | | | | | | L0806: 1, L0659: 1, |
| | | | | | | | H0144: 1, H0539: 1, |
| | | | | | | | H0521: 1, H0436: 1, |
| | | | | | | | L0742: 1, L0740: 1, |
| | | | | | | | L0757: 1, H0542: 1, |
| | | | | | | | H0008: 1 and H0352: 1. |
| | | 1212943 | 156 | 1015-1371 | 343 | Ser-29 to Pro-43, | |
| | | | | | | Phe-55 to Gln-66, | |
| | | | | | | Thr-86 to His-93. | |
| 53 | HSYHD12 | 1280343 | 63 | 301-1701 | 250 | Gly-22 to Ile-34, | L0805: 2, H0520: 2, |
| | | | | | | Ser-58 to Gly-67, | L0748: 2, H0171: 1, |
| | | | | | | Ala-77 to Thr-83, | H0176: 1, S0360: 1, |
| | | | | | | Tyr-104 to Leu-110, | H0013: 1, H0309: 1, |
| | | | | | | Val-132 to Leu-141, | H0046: 1, H0050: 1, |
| | | | | | | Lys-181 to Leu-189, | H0292: 1, S0003: 1, |
| | | | | | | Thr-193 to Lys-198, | S0214: 1, H0551: 1, |
| | | | | | | Glu-242 to Asn-249, | H0647: 1, H0547: 1, |
| | | | | | | Gly-258 to Lys-263, | H0660: 1, L0777: 1, |
| | | | | | | Asn-293 to Ser-303, | L0591: 1 and L0608: 1. |
| | | | | | | Arg-308 to Arg-316, | |
| | | | | | | His-397 to Lys-406, | |
| | | | | | | Ala-425 to Lys-434, | |
| | | | | | | Glu-441 to Gly-449, | |
| | | | | | | Gln-461 to Leu-466. | |
| | | 1209769 | 157 | 312-1409 | 344 | Gly-22 to Ile-34, | |
| | | | | | | Ser-58 to Gly-67, | |
| | | | | | | Ala-77 to Thr-83, | |
| | | | | | | Tyr-104 to Leu-110, | |
| | | | | | | Val-132 to Leu-141, | |
| | | | | | | Lys-181 to Ser-188. | |
| 54 | HTAGF12 | 1276746 | 64 | 305-493 | 251 | | H0556: 2, H0635: 2, |
| | | | | | | | S0116: 1, S0388: 1, |
| | | | | | | | H0634: 1, L0638: 1 and |
| | | | | | | | S0031: 1. |
| 1 | | 1222310 | 158 | 298-486 | 345 | | |
| | | 1222309 | 159 | 28-84 | 346 | | |
| 55 | HTHCA16 | 1243880 | 65 | 77-997 | 252 | Gly-59 to Gly-64, | H0046: 3, H0341: 2, |
| | | | | | | Arg-87 to Ser-92, | H0635: 2, H0445: 2, |
| | | | | | | Pro-132 to Gly-137, | H0295: 1, S0114: 1, |
| | | | | | | Arg-175 to Arg-195, | H0255: 1, S0418: 1, |
| | | | | | | Pro-230 to Trp-236, | S0007: 1, S0045: 1, |
| | | | | | | Gly-277 to Gly-284, | H0608: 1, H0587: 1, |
| | | | | | | Pro-291 to Arg-297. | H0250: 1, S0182: 1, |
| | | | | | | | H0052: 1, H0050: 1, |
| | | | | | | | H0083: 1, H0266: 1, |
| | | | | | | | H0553: 1, H0063: 1, |
| | | | | | | | H0264: 1, H0022: 1, |
| | | | | | | | S0002: 1, L0763: 1, |
| | | | | | | | L0761: 1, L0768: 1, |
| | | | | | | | L0794: 1, L0809: 1, |
| | | | | | | | S0374: 1, H0689: 1, |
| | | | | | | | H0522: 1 and H0423: 1. |
| | | 1059497 | 160 | 99-1019 | 347 | Gly-59 to Gly-64, | |
| | | | | | | Arg-87 to Ser-92, | |
| | | | | | | Pro-132 to Gly-137, | |
| | | | | | | Arg-175 to Arg-195, | |
| | | | | | | Pro-230 to Trp-236, | |
| | | | | | | Gly-277 to Gly-284, | |
| | | | | | | Pro-291 to Arg-297. | |
| 56 | HNFIQ15 | 1282887 | 66 | 105-680 | 253 | Ser-4 to Gln-10, | H0271: 35, H0253: 29, |
| | | | | | | Pro-85 to Gly-90, | H0618: 26, L0766: 19, |
| | | | | | | Gly-137 to Gly-146, | L0769: 12, H0457: 10, |
| | | | | | | Arg-154 to Ser-161, | S0474: 9, L0731: 9, |
| | | | | | | Glu-164 to Leu-171, | L0757: 9, L0758: 6, |
| | | | | | | Pro-178 to Glu-190. | H0445: 6, L0601: 6, |
| | | | | | | | S0046: 5, H0179: 5, |
| | | | | | | | H0416: 5, S0126: 5, |
| | | | | | | | H0265: 4, S0418: 4, |
| | | | | | | | S0420: 4, H0069: 4, |
| | | | | | | | L0761: 4, L0752: 4, |
| | | | | | | | H0556: 3, H0619: 3, |
| | | | | | | | H0486: 3, H0052: 3, |
| | | | | | | | H0024: 3, H0634: 3, |
| | | | | | | | H0623: 3, T0041: 3, |
| | | | | | | | L0637: 3, S0006: 3, |
| | | | | | | | S0052: 3, L0743: 3, |
| | | | | | | | L0754: 3, L0750: 3, |
| | | | | | | | H0716: 2, H0255: 2, |
| | | | | | | | H0306: 2, H0402: 2, |
| | | | | | | | H0592: 2, H0581: 2, |
| | | | | | | | H0545: 2, H0046: 2, |
| | | | | | | | H0050: 2, H0266: 2, |
| | | | | | | | H0622: 2, H0553: 2, |
| | | | | | | | S0036: 2, H0087: 2, |
| | | | | | | | H0056: 2, L0774: 2, |
| | | | | | | | L0655: 2, L0783: 2, |
| | | | | | | | L5623: 2, H0547: 2, |
| | | | | | | | H0519: 2, L0748: 2, |
| | | | | | | | L0751: 2, L0747: 2, |
| | | | | | | | L0779: 2, S0436: 2, |
| | | | | | | | L0603: 2, H0624: 1, |
| | | | | | | | H0171: 1, H0222: 1, |
| | | | | | | | H0686: 1, S0040: 1, |
| | | | | | | | H0717: 1, H0295: 1, |
| | | | | | | | H0657: 1, L0427: 1, |
| | | | | | | | H0254: 1, S0358: 1, |
| | | | | | | | H0580: 1, H0730: 1, |
| | | | | | | | H0437: 1, H0261: 1, |
| | | | | | | | S0222: 1, H0610: 1, |
| | | | | | | | H0013: 1, H0250: 1, |
| | | | | | | | H0002: 1, H0599: 1, |
| | | | | | | | H0318: 1, H0086: 1, |
| | | | | | | | H0567: 1, H0123: 1, |
| | | | | | | | H0015: 1, T0010: 1, |
| | | | | | | | H0355: 1, H0286: 1, |
| | | | | | | | S0250: 1, H0031: 1, |
| | | | | | | | H0628: 1, H0135: 1, |
| | | | | | | | H0090: 1, H0551: 1, |
| | | | | | | | H0264: 1, H0412: 1, |
| | | | | | | | H0413: 1, H0100: 1, |
| | | | | | | | H0494: 1, S0438: 1, |
| | | | | | | | S0144: 1, S0002: 1, |
| | | | | | | | L0770: 1, L5575: 1, |
| | | | | | | | L0667: 1, L0772: 1, |
| | | | | | | | L0646: 1, L0662: 1, |
| | | | | | | | L0794: 1, L0387: 1, |
| | | | | | | | L0775: 1, L0653: 1, |
| | | | | | | | L0659: 1, L0809: 1, |
| | | | | | | | L0789: 1, L0792: 1, |
| | | | | | | | L0663: 1, L0665: 1, |
| | | | | | | | S0428: 1, S0216: 1, |
| | | | | | | | L0565: 1, H0435: 1, |
| | | | | | | | H0658: 1, S0380: 1, |
| | | | | | | | S0152: 1, S0190: 1, |
| | | | | | | | H0134: 1, H0555: 1, |
| | | | | | | | H0436: 1, S0390: 1, |
| | | | | | | | S0037: 1, L0439: 1, |
| | | | | | | | H0707: 1, S0194: 1, |
| | | | | | | | S0196: 1, H0542: 1, |
| | | | | | | | H0543: 1 and H0422: 1. |
| 1 | | 1212720 | 161 | 105-425 | 348 | Ser-4 to Gln-10, | |
| | | | | | | Pro-85 to Val-91. | |
| 1 | | 1201579 | 162 | 417-827 | 349 | Ser-4 to Ala-14, | |
| | | | | | | Ala-43 to Cys-56, | |
| | | | | | | Pro-92 to Thr-97. | |
| | | 1049987 | 163 | 255-560 | 350 | Glu-1 to Pro-10. | |
| 57 | HNHPS28 | 1243890 | 67 | 208-648 | 254 | Glu-18 to Lys-34, | S0216: 1 |
| | | | | | | Ser-41 to Ser-56, | |
| | | | | | | Gly-61 to Lys-67, | |
| | | | | | | Met-77 to Gly-82, | |
| | | | | | | Glu-89 to His-96. | |
| | | 1209276 | 164 | 201-599 | 351 | Glu-18 to Lys-34, | |
| | | | | | | Ser-41 to Ser-56, | |
| | | | | | | Gly-61 to Lys-67, | |
| | | | | | | Met-77 to Gly-82, | |
| | | | | | | Glu-89 to His-96. | |
| 58 | HNTDN59 | 1280527 | 68 | 117-2450 | 255 | Pro-25 to Val-31, | L0744: 15, L0758: 15, |
| | | | | | | Trp-157 to Thr-167, | L0747: 13, S0358: 12, |
| | | | | | | Ala-311 to Arg-318, | H0539: 12, L0439: 12, |
| | | | | | | Ser-354 to Phe-361, | L0766: 10, L0770: 9, |
| | | | | | | Cys-377 to Met-383, | L0750: 9, H0574: 8, |
| | | | | | | Asn-389 to Lys-395, | L0775: 8, L0748: 7, |
| | | | | | | Pro-407 to Asp-414, | L0646: 6, L0666: 6, |
| | | | | | | Glu-421 to Asn-430, | L0752: 6, S0442: 5, |
| | | | | | | Asp-433 to Ile-438, | H0632: 5, H0551: 5, |
| | | | | | | Gln-465 to Thr-472, | L0769: 5, L0659: 5, |
| | | | | | | Val-475 to Leu-480, | L0519: 5, L0755: 5, |
| | | | | | | Asp-492 to Asp-498, | S0360: 4, S0007: 4, |
| | | | | | | Pro-527 to Glu-533, | H0046: 4, H0012: 4, |
| | | | | | | Ser-670 to Lys-675, | H0510: 4, S0440: 4, |
| | | | | | | Thr-734 to Arg-740. | L0764: 4, H0521: 4, |
| | | | | | | | L0759: 4, H0657: 3, |
| | | | | | | | S0420: 3, S0046: 3, |
| | | | | | | | H0441: 3, H0486: 3, |
| | | | | | | | H0575: 3, H0327: 3, |
| | | | | | | | H0544: 3, H0620: 3, |
| | | | | | | | H0687: 3, H0617: 3, |
| | | | | | | | H0413: 3, L0774: 3, |
| | | | | | | | L0776: 3, L0657: 3, |
| | | | | | | | L0664: 3, L0665: 3, |
| | | | | | | | S0374: 3, S0328: 3, |
| | | | | | | | S0152: 3, S0406: 3, |
| | | | | | | | S3012: 3, L0751: 3, |
| | | | | | | | L0754: 3, L0777: 3, |
| | | | | | | | L0591: 3, H0624: 2, |
| | | | | | | | H0170: 2, H0556: 2, |
| | | | | | | | S0134: 2, H0583: 2, |
| | | | | | | | S0354: 2, S0410: 2, |
| | | | | | | | H0393: 2, H0549: 2, |
| | | | | | | | S0222: 2, H0331: 2, |
| | | | | | | | H0492: 2, S0280: 2, |
| | | | | | | | H0599: 2, H0036: 2, |
| | | | | | | | H0421: 2, H0309: 2, |
| | | | | | | | H0009: 2, H0051: 2, |
| | | | | | | | H0083: 2, H0181: 2, |
| | | | | | | | H0674: 2, H0400: 2, |
| | | | | | | | H0412: 2, S0038: 2, |
| | | | | | | | H0100: 2, H0494: 2, |
| | | | | | | | S0438: 2, H0509: 2, |
| | | | | | | | S0150: 2, S0002: 2, |
| | | | | | | | L0637: 2, L0771: 2, |
| | | | | | | | L0662: 2, L0768: 2, |
| | | | | | | | L0794: 2, L0803: 2, |
| | | | | | | | L0804: 2, L0375: 2, |
| | | | | | | | L0651: 2, L0806: 2, |
| | | | | | | | L0655: 2, L0791: 2, |
| | | | | | | | H0593: 2, H0660: 2, |
| | | | | | | | H0522: 2, L0731: 2, |
| | | | | | | | L0485: 2, L0581: 2, |
| | | | | | | | L0608: 2, L0593: 2, |
| | | | | | | | L0594: 2, L0361: 2, |
| | | | | | | | S0194: 2, H0149: 1, |
| | | | | | | | H0265: 1, S0040: 1, |
| | | | | | | | S6024: 1, T0049: 1, |
| | | | | | | | L0785: 1, H0484: 1, |
| | | | | | | | H0255: 1, H0662: 1, |
| | | | | | | | H0638: 1, S0418: 1, |
| | | | | | | | S0376: 1, S0444: 1, |
| | | | | | | | S0408: 1, S0300: 1, |
| | | | | | | | H0411: 1, S0278: 1, |
| | | | | | | | H0431: 1, H0409: 1, |
| | | | | | | | H0586: 1, H0333: 1, |
| | | | | | | | L0622: 1, H0485: 1, |
| | | | | | | | T0040: 1, H0635: 1, |
| | | | | | | | H0156: 1, H0042: 1, |
| | | | | | | | S0010: 1, T0048: 1, |
| | | | | | | | H0052: 1, H0251: 1, |
| | | | | | | | H0263: 1, H0596: 1, |
| | | | | | | | T0115: 1, T0110: 1, |
| | | | | | | | L0040: 1, H0545: 1, |
| | | | | | | | H0041: 1, H0123: 1, |
| | | | | | | | H0011: 1, H0024: 1, |
| | | | | | | | L0163: 1, S0051: 1, |
| | | | | | | | H0355: 1, S0314: 1, |
| | | | | | | | H0252: 1, L0483: 1, |
| | | | | | | | H0424: 1, H0213: 1, |
| | | | | | | | H0031: 1, H0673: 1, |
| | | | | | | | S0364: 1, L0456: 1, |
| | | | | | | | H0598: 1, H0135: 1, |
| | | | | | | | H0087: 1, H0272: 1, |
| | | | | | | | H0488: 1, H0433: 1, |
| | | | | | | | H0625: 1, H0386: 1, |
| | | | | | | | H0647: 1, S0142: 1, |
| | | | | | | | S0210: 1, S0422: 1, |
| | | | | | | | S0426: 1, H0529: 1, |
| | | | | | | | L0371: 1, L0761: 1, |
| | | | | | | | L0772: 1, L0641: 1, |
| | | | | | | | L0374: 1, L0649: 1, |
| | | | | | | | L0381: 1, L0650: 1, |
| | | | | | | | L0526: 1, L0518: 1, |
| | | | | | | | L0782: 1, L0783: 1, |
| | | | | | | | L0382: 1, L0809: 1, |
| | | | | | | | L0647: 1, L0790: 1, |
| | | | | | | | L0793: 1, L0663: 1, |
| | | | | | | | H0144: 1, H0547: 1, |
| | | | | | | | H0519: 1, S0126: 1, |
| | | | | | | | H0711: 1, H0690: 1, |
| | | | | | | | H0682: 1, H0435: 1, |
| | | | | | | | H0659: 1, H0658: 1, |
| | | | | | | | H0670: 1, S0378: 1, |
| | | | | | | | S0380: 1, H0710: 1, |
| | | | | | | | S0013: 1, H0696: 1, |
| | | | | | | | H0704: 1, S0044: 1, |
| | | | | | | | S3014: 1, S0028: 1, |
| | | | | | | | L0743: 1, L0740: 1, |
| | | | | | | | L0756: 1, L0779: 1, |
| | | | | | | | L0780: 1, L0757: 1, |
| | | | | | | | H0445: 1, L0588: 1, |
| | | | | | | | S0011: 1, S0026: 1, |
| | | | | | | | H0136: 1, S0276: 1, |
| | | | | | | | H0422: 1, S0462: 1 and |
| | | | | | | | H0506: 1. |
| 1 | | 1215793 | 165 | 106-516 | 352 | Pro-25 to Val-31. | |
| 1 | | 1215794 | 166 | 107-508 | 353 | Pro-25 to Val-31. | |
| | | 1210379 | 167 | 1-909 | 354 | Lys-53 to Asn-58, | |
| | | | | | | Thr-282 to Gly-288, | |
| | | | | | | Glu-294 to Gln-303. | |
| 59 | HNTQM17 | 1283173 | 69 | 251-904 | 256 | Pro-69 to Gln-75, | L0803: 4, L0439: 4, |
| | | | | | | Arg-81 to Leu-90, | L0774: 3, L0777: 3, |
| | | | | | | Glu-119 to Tyr-124, | S0212: 2, H0169: 2, |
| | | | | | | Lys-178 to Glu-184, | L0805: 2, H0354: 1, |
| | | | | | | Leu-201 to Asn-206, | T0006: 1, H0553: 1, |
| | | | | | | Leu-210 to Gly-215. | L0770: 1, L0639: 1, |
| | | | | | | | L0764: 1, L0794: 1, |
| | | | | | | | L0804: 1, L0378: 1, |
| | | | | | | | L0783: 1, L0789: 1, |
| | | | | | | | H0519: 1, L0748: 1, |
| | | | | | | | L0749: 1 and L0758: 1. |
| | | 1209252 | 168 | 241-594 | 355 | | |
| 60 | HNTTF76 | 1243907 | 70 | 59-340 | 257 | Thr-32 to Ser-38, | H0556: 1 and H0547: |
| | | | | | | Thr-46 to Pro-51. | 1. |
| | | 1213468 | 169 | 48-329 | 356 | Thr-32 to Ser-38, | |
| | | | | | | Thr-46 to Pro-51. | |
| 61 | HCFGD60 | 1253155 | 71 | 137-505 | 258 | Ser-97 to Trp-104. | L0794: 2, L0439: 2, |
| | | | | | | | S0354: 1, S0002: 1, |
| | | | | | | | L0779: 1, H0445: 1 and |
| | | | | | | | H0422: 1. |
| | | 1212775 | 170 | 496-864 | 357 | Ser-97 to Trp-104. | |
| 62 | HMUEP30 | 1262057 | 72 | 251-592 | 259 | Pro-6 to Trp-12, | H0529: 8, L0794: 5, |
| | | | | | | Thr-18 to Pro-24, | S0424: 4, H0559: 3, |
| | | | | | | Pro-47 to Trp-63, | H0083: 3, L0769: 3, |
| | | | | | | Pro-71 to Phe-76, | L0809: 3, L0748: 3, |
| | | | | | | Pro-99 to Trp-111. | L0759: 3, S0192: 3, |
| | | | | | | | H0341: 2, H0587: 2, |
| | | | | | | | H0266: 2, H0286: 2, |
| | | | | | | | H0623: 2, S0422: 2, |
| | | | | | | | L0761: 2, L0783: 2, |
| | | | | | | | L0565: 2, L0745: 2, |
| | | | | | | | L0756: 2, L0777: 2, |
| | | | | | | | H0665: 2, H0739: 1, |
| | | | | | | | H0265: 1, H0685: 1, |
| | | | | | | | H0657: 1, H0484: 1, |
| | | | | | | | S0420: 1, S0358: 1, |
| | | | | | | | H0592: 1, H0013: 1, |
| | | | | | | | H0427: 1, L0021: 1, |
| | | | | | | | S0474: 1, H0581: 1, |
| | | | | | | | H0597: 1, H0546: 1, |
| | | | | | | | H0046: 1, H0086: 1, |
| | | | | | | | H0024: 1, H0604: 1, |
| | | | | | | | H0181: 1, H0272: 1, |
| | | | | | | | S0438: 1, H0647: 1, |
| | | | | | | | S0144: 1, L0639: 1, |
| | | | | | | | L0372: 1, L0800: 1, |
| | | | | | | | L0644: 1, L0766: 1, |
| | | | | | | | L0803: 1, L0382: 1, |
| | | | | | | | L0787: 1, L0788: 1, |
| | | | | | | | L0663: 1, S0374: 1, |
| | | | | | | | H0547: 1, H0593: 1, |
| | | | | | | | H0521: 1, H0522: 1, |
| | | | | | | | S3014: 1, S0027: 1, |
| | | | | | | | L0740: 1, L0751: 1, |
| | | | | | | | L0746: 1, L0749: 1, |
| | | | | | | | L0779: 1, L0757: 1 and |
| | | | | | | | S0436: 1. |
| | | 1209865 | 171 | 241-528 | 358 | Pro-6 to Trp-12, | |
| | | | | | | Thr-18 to Pro-24, | |
| | | | | | | Pro-47 to Trp-63, | |
| | | | | | | Pro-71 to Phe-76. | |
| 63 | HNSCA10 | 1268201 | 73 | 279-926 | 260 | Met-1 to Lys-6, | L0777: 8, L0749: 4, |
| | | | | | | Met-170 to His-176, | S0434: 4, H0551: 3, |
| | | | | | | Lys-207 to Glu-215. | S0026: 3, S0010: 2, |
| | | | | | | | L0748: 2, L0751: 2, |
| | | | | | | | L0750: 2, L0759: 2, |
| | | | | | | | S0358: 1, S0408: 1, |
| | | | | | | | L0021: 1, T0082: 1, |
| | | | | | | | T0010: 1, H0083: 1, |
| | | | | | | | L0483: 1, L0455: 1, |
| | | | | | | | H0616: 1, H0494: 1, |
| | | | | | | | H0560: 1, H0529: 1, |
| | | | | | | | L0646: 1, L0641: 1, |
| | | | | | | | L0643: 1, L0662: 1, |
| | | | | | | | L0775: 1, L0661: 1, |
| | | | | | | | L0526: 1, L0789: 1, |
| | | | | | | | S0374: 1, H0547: 1, |
| | | | | | | | H0519: 1, S0126: 1, |
| | | | | | | | S0378: 1, L0740: 1, |
| | | | | | | | L0747: 1, L0592: 1 and |
| | | | | | | | S0242: 1. |
| | | 1209403 | 172 | 266-652 | 359 | Met-1 to Lys-6. | |
| 64 | HTPAO67 | 1280558 | 74 | 2709-2963 | 261 | Met-1 to Lys-10, | L0748: 6, L0747: 6, |
| | | | | | | Leu-30 to Thr-42. | S0360: 5, L0777: 5, |
| | | | | | | | L0731: 5, L0599: 5, |
| | | | | | | | H0486: 4, H0644: 4, |
| | | | | | | | L0588: 4, H0013: 3, |
| | | | | | | | H0599: 3, H0575: 3, |
| | | | | | | | H0622: 3, H0412: 3, |
| | | | | | | | H0413: 3, H0056: 3, |
| | | | | | | | L0769: 3, L0803: 3, |
| | | | | | | | L0805: 3, L0439: 3, |
| | | | | | | | L0749: 3, S0116: 2, |
| | | | | | | | H0375: 2, H0032: 2, |
| | | | | | | | H0674: 2, H0038: 2, |
| | | | | | | | H0623: 2, L0770: 2, |
| | | | | | | | L0646: 2, L0807: 2, |
| | | | | | | | L0809: 2, L0789: 2, |
| | | | | | | | L0744: 2, L0752: 2, |
| | | | | | | | H0595: 2, L0605: 2, |
| | | | | | | | L0604: 2, H0624: 1, |
| | | | | | | | H0717: 1, H0716: 1, |
| | | | | | | | S0282: 1, H0661: 1, |
| | | | | | | | H0638: 1, S0442: 1, |
| | | | | | | | S0444: 1, H0208: 1, |
| | | | | | | | H0437: 1, H0431: 1, |
| | | | | | | | H0601: 1, T0060: 1, |
| | | | | | | | H0069: 1, H0427: 1, |
| | | | | | | | L0022: 1, S0474: 1, |
| | | | | | | | H0235: 1, H0050: 1, |
| | | | | | | | H0197: 1, H0024: 1, |
| | | | | | | | H0266: 1, H0271: 1, |
| | | | | | | | H0039: 1, L0143: 1, |
| | | | | | | | H0111: 1, H0634: 1, |
| | | | | | | | H0616: 1, H0268: 1, |
| | | | | | | | H0509: 1, H0647: 1, |
| | | | | | | | S0422: 1, L0640: 1, |
| | | | | | | | L0637: 1, L0768: 1, |
| | | | | | | | L0775: 1, L0659: 1, |
| | | | | | | | L0666: 1, L0665: 1, |
| | | | | | | | H0144: 1, S0126: 1, |
| | | | | | | | H0689: 1, H0682: 1, |
| | | | | | | | H0659: 1, H0672: 1, |
| | | | | | | | S0406: 1, H0727: 1, |
| | | | | | | | S0206: 1, L0780: 1, |
| | | | | | | | L0581: 1 and H0506: 1. |
| 1 | | 1217178 | 173 | 1579-1833 | 360 | Met-1 to Lys-10, | |
| | | | | | | Leu-30 to Thr-42. | |
| | | 1217177 | 174 | 6-269 | 361 | Val-4 to Gln-10. | |
| 65 | HAZCB15 | 1243853 | 75 | 32-382 | 262 | Asp-33 to Gly-43, | H0690: 1 |
| | | | | | | Ser-54 to His-60, | |
| | | | | | | Pro-111 to Phe-116. | |
| | | 1209801 | 175 | 7-357 | 362 | | |
| 66 | HSLFK66 | 1271609 | 76 | 167-586 | 263 | Lys-133 to Asp-139. | S0028: 19, S0031: 9, |
| | | | | | | | S0052: 8, S0050: 7, |
| | | | | | | | L0105: 5, S0282: 4, |
| | | | | | | | H0381: 3, S0045: 3, |
| | | | | | | | S0278: 3, H0271: 3, |
| | | | | | | | H0617: 3, S0428: 3, |
| | | | | | | | S0001: 2, S0049: 2, |
| | | | | | | | H0196: 2, H0179: 2, |
| | | | | | | | S0038: 2, S0144: 2, |
| | | | | | | | S0044: 2, S0390: 2, |
| | | | | | | | S0206: 2, S0260: 2, |
| | | | | | | | L0591: 2, L0362: 2, |
| | | | | | | | L0361: 2, L0603: 2, |
| | | | | | | | S0035: 1, S0046: 1, |
| | | | | | | | H0253: 1, H0318: 1, |
| | | | | | | | T0110: 1, H0266: 1, |
| | | | | | | | H0416: 1, H0031: 1, |
| | | | | | | | H0180: 1, H0181: 1, |
| | | | | | | | H0383: 1, H0169: 1, |
| | | | | | | | S0036: 1, H0135: 1, |
| | | | | | | | H0163: 1, H0634: 1, |
| | | | | | | | H0164: 1, L0374: 1, |
| | | | | | | | L0379: 1, S0126: 1, |
| | | | | | | | S0037: 1 and S3014: 1. |
| | | 1224406 | 176 | 2610-3029 | 363 | Lys-133 to Asp-139. | |
| 67 | HCFPE46 | 1243901 | 77 | 151-399 | 264 | | H0728: 1, H0734: 1, |
| | | | | | | | H0708: 1, H0494: 1, |
| | | | | | | | L0665: 1, H0672: 1, |
| | | | | | | | H0694: 1 and H0423: 1. |
| | | 1223989 | 177 | 140-388 | 364 | | |
| 68 | HNGPB91 | 1253113 | 78 | 83-262 | 265 | | S0428: 1 |
| 1 | | 1212875 | 178 | 70-249 | 365 | | |
| | | 1045322 | 179 | 111-413 | 366 | | |
| 69 | HRADV31 | 1275159 | 79 | 203-298 | 266 | | L0439: 6, L0748: 2, |
| | | | | | | | L0756: 2, L0779: 2, |
| | | | | | | | L0758: 2, L0608: 2, |
| | | | | | | | H0624: 1, S0001: 1, |
| | | | | | | | S0442: 1, S0360: 1, |
| | | | | | | | H0619: 1, L0717: 1, |
| | | | | | | | H0486: 1, H0596: 1, |
| | | | | | | | L0041: 1, L0471: 1, |
| | | | | | | | H0032: 1, H0591: 1, |
| | | | | | | | L0351: 1, H0494: 1, |
| | | | | | | | H0561: 1, L0764: 1, |
| | | | | | | | L0766: 1, L0803: 1, |
| | | | | | | | L0774: 1, L0651: 1, |
| | | | | | | | L0629: 1, L0665: 1, |
| | | | | | | | L0438: 1, H0555: 1, |
| | | | | | | | H0436: 1, L0740: 1, |
| | | | | | | | L0777: 1, L0759: 1, |
| | | | | | | | L0605: 1 and S0242: 1. |
| 1 | | 1209606 | 180 | 188-283 | 367 | | |
| | | 1046790 | 181 | 54-407 | 368 | | |
| 70 | HNBVG70 | 1243889 | 80 | 273-536 | 267 | Asp-10 to Ala-17, | L0439: 4, L0794: 3, |
| | | | | | | Arg-75 to Glu-81. | L0803: 3, L0805: 3, |
| | | | | | | | H0662: 2, L0769: 2, |
| | | | | | | | L0776: 2, L0438: 2, |
| | | | | | | | L0744: 2, L0748: 2, |
| | | | | | | | L0599: 2, S6024: 1, |
| | | | | | | | S0360: 1, H0411: 1, |
| | | | | | | | S0222: 1, H0592: 1, |
| | | | | | | | H0587: 1, L0021: 1, |
| | | | | | | | H0688: 1, L0455: 1, |
| | | | | | | | S0366: 1, H0616: 1, |
| | | | | | | | H0551: 1, L0764: 1, |
| | | | | | | | L0804: 1, L0787: 1, |
| | | | | | | | L0663: 1, L0745: 1, |
| | | | | | | | L0779: 1, L0758: 1 and |
| | | | | | | | S0436: 1. |
| | | 1225912 | 182 | 981-1244 | 369 | Pro-11 to Ala-17, | |
| | | | | | | Arg-75 to Glu-81. | |
| 71 | HCFGK19 | 1253156 | 81 | 334-555 | 268 | | S0114: 1, H0305: 1 and |
| | | | | | | | H0422: 1. |
| | | 1213458 | 183 | 472-693 | 370 | | |
| 72 | HNGOG04 | 1243925 | 82 | 27-272 | 269 | Arg-22 to Leu-30. | S0428: 1 |
| | | 1212831 | 184 | 20-265 | 371 | Arg-22 to Leu-30. | |
| 73 | HDCGC29 | 1253157 | 83 | 269-424 | 270 | Met-1 to Val-6. | H0637: 1 |
| | | 1210197 | 185 | 253-435 | 372 | | |
| 74 | HNGNT27 | 1261927 | 84 | 61-312 | 271 | Ser-28 to Ser-38, | S0428: 1 |
| | | | | | | Cys-51 to Pro-57, | |
| | | | | | | Val-60 to Val-65, | |
| | | | | | | Arg-67 to Val-78. | |
| | | 1213013 | 186 | 54-305 | 373 | Ser-28 to Ser-38, | |
| | | | | | | Cys-51 to Pro-57, | |
| | | | | | | Val-60 to Val-65, | |
| | | | | | | Arg-67 to Val-78. | |
| 75 | HMUHD72 | 1281806 | 85 | 168-422 | 272 | Met-34 to Ser-40, | H0069: 4, H0599: 4, |
| | | | | | | Pro-65 to Ser-83. | H0521: 3, L0596: 3, |
| | | | | | | | H0341: 2, H0255: 2, |
| | | | | | | | H0551: 2, S0344: 2, |
| | | | | | | | S0040: 1, H0254: 1, |
| | | | | | | | H0125: 1, S0442: 1, |
| | | | | | | | H0728: 1, H0208: 1, |
| | | | | | | | S0045: 1, S0046: 1, |
| | | | | | | | H0437: 1, H0586: 1, |
| | | | | | | | H0486: 1, T0114: 1, |
| | | | | | | | H0036: 1, H0052: 1, |
| | | | | | | | H0327: 1, T0010: 1, |
| | | | | | | | H0266: 1, H0288: 1, |
| | | | | | | | H0598: 1, H0063: 1, |
| | | | | | | | H0488: 1, H0413: 1, |
| | | | | | | | S0144: 1, H0529: 1, |
| | | | | | | | L0771: 1, L0766: 1, |
| | | | | | | | H0555: 1, S0037: 1, |
| | | | | | | | S0027: 1, L0439: 1, |
| | | | | | | | L0740: 1 and L0366: 1. |
| | | 1209710 | 187 | 204-458 | 374 | Met-34 to Ser-40, | |
| | | | | | | Pro-65 to Ser-83. | |
| 76 | HLYCK47 | 1272921 | 86 | 72-764 | 273 | Arg-25 to Gly-31, | H0521: 38, H0522: 13, |
| | | | | | | Pro-45 to Gly-52, | H0445: 6, L0748: 4, |
| | | | | | | Pro-71 to Gly-76, | S0360: 3, H0264: 3, |
| | | | | | | Pro-81 to Gly-88, | S0354: 2, H0039: 2, |
| | | | | | | Met-90 to Phe-103, | H0622: 2, H0063: 2, |
| | | | | | | Thr-110 to Pro-119, | S0374: 2, L0744: 2, |
| | | | | | | Pro-132 to Gly-141, | S0212: 1, S0358: 1, |
| | | | | | | Gly-179 to Asn-188. | H0427: 1, H0575: 1, |
| | | | | | | | H0122: 1, H0309: 1, |
| | | | | | | | H0570: 1, H0123: 1, |
| | | | | | | | H0620: 1, H0375: 1, |
| | | | | | | | H0553: 1, H0644: 1, |
| | | | | | | | H0376: 1, L0435: 1, |
| | | | | | | | L0439: 1, L0754: 1, |
| | | | | | | | S0434: 1, S0106: 1, |
| | | | | | | | H0668: 1 and S0384: 1. |
| 1 | | 1221159 | 188 | 119-550 | 375 | Arg-25 to Gly-31, | |
| | | | | | | Pro-45 to Gly-52, | |
| | | | | | | Pro-71 to Gly-76, | |
| | | | | | | Pro-81 to Gly-91. | |
| | | 1221167 | 189 | 108-845 | 376 | Arg-25 to Gly-31, | |
| | | | | | | Pro-45 to Gly-52, | |
| | | | | | | Pro-71 to Gly-76, | |
| | | | | | | Pro-81 to Gly-91, | |
| | | | | | | Glu-107 to Phe-118, | |
| | | | | | | Thr-125 to Pro-134, | |
| | | | | | | Pro-147 to Gly-156, | |
| | | | | | | Gly-194 to Asn-203. | |
| 77 | HLYFJ90 | 1243873 | 87 | 230-481 | 274 | Arg-50 to Leu-60. | L0749: 5, L0769: 4, |
| | | | | | | | L0758: 4, L0731: 3, |
| | | | | | | | L0804: 2, L0774: 2, |
| | | | | | | | L0757: 2, H0662: 1, |
| | | | | | | | S0358: 1, S0444: 1, |
| | | | | | | | S0222: 1, H0441: 1, |
| | | | | | | | L0623: 1, H0251: 1, |
| | | | | | | | H0046: 1, H0569: 1, |
| | | | | | | | H0673: 1, H0494: 1, |
| | | | | | | | L0763: 1, L0764: 1, |
| | | | | | | | L0662: 1, L0794: 1, |
| | | | | | | | L0375: 1, L0806: 1, |
| | | | | | | | L0805: 1, L0532: 1, |
| | | | | | | | H0593: 1, H0539: 1, |
| | | | | | | | L0742: 1, L0748: 1, |
| | | | | | | | L0747: 1, L0750: 1, |
| | | | | | | | L0779: 1, L0777: 1 and |
| | | | | | | | H0445: 1. |
| | | 1218626 | 190 | 258-509 | 377 | Arg-50 to Leu-60. | |
| 78 | HMLHD54 | 1243834 | 88 | 75-350 | 275 | Met-1 to Leu-6, | L0665: 5, L0777: 5, |
| | | | | | | Thr-32 to Glu-39. | H0521: 4, S0026: 4, |
| | | | | | | | L0662: 3, H0520: 3, |
| | | | | | | | L0596: 3, L0592: 3, |
| | | | | | | | H0632: 2, H0012: 2, |
| | | | | | | | H0266: 2, H0264: 2, |
| | | | | | | | L0773: 2, L0774: 2, |
| | | | | | | | L0659: 2, L0663: 2, |
| | | | | | | | L0664: 2, S0126: 2, |
| | | | | | | | H0684: 2, L0748: 2, |
| | | | | | | | L0779: 2, L0752: 2, |
| | | | | | | | H0506: 2, H0686: 1, |
| | | | | | | | H0717: 1, H0716: 1, |
| | | | | | | | L0778: 1, S0116: 1, |
| | | | | | | | S0212: 1, H0638: 1, |
| | | | | | | | S0356: 1, S0442: 1, |
| | | | | | | | S0358: 1, S0376: 1, |
| | | | | | | | S0444: 1, H0722: 1, |
| | | | | | | | S0278: 1, H0369: 1, |
| | | | | | | | H0431: 1, H0442: 1, |
| | | | | | | | H0613: 1, H0331: 1, |
| | | | | | | | H0574: 1, S0280: 1, |
| | | | | | | | L0021: 1, H0575: 1, |
| | | | | | | | H0421: 1, H0363: 1, |
| | | | | | | | H0184: 1, H0050: 1, |
| | | | | | | | H0373: 1, S0388: 1, |
| | | | | | | | S0250: 1, S0214: 1, |
| | | | | | | | H0252: 1, H0039: 1, |
| | | | | | | | H0124: 1, H0040: 1, |
| | | | | | | | H0494: 1, H0509: 1, |
| | | | | | | | H0652: 1, S0144: 1, |
| | | | | | | | S0142: 1, S0210: 1, |
| | | | | | | | L0769: 1, L0637: 1, |
| | | | | | | | L0667: 1, L0648: 1, |
| | | | | | | | L0766: 1, L0775: 1, |
| | | | | | | | L0378: 1, L0542: 1, |
| | | | | | | | L0809: 1, L0543: 1, |
| | | | | | | | H0703: 1, H0726: 1, |
| | | | | | | | H0547: 1, H0519: 1, |
| | | | | | | | H0648: 1, S0380: 1, |
| | | | | | | | H0709: 1, S0136: 1, |
| | | | | | | | H0696: 1, S0406: 1, |
| | | | | | | | H0631: 1, L0740: 1, |
| | | | | | | | L0755: 1, L0731: 1, |
| | | | | | | | L0757: 1, L0758: 1, |
| | | | | | | | H0445: 1, H0595: 1, |
| | | | | | | | S0434: 1, L0361: 1, |
| | | | | | | | H0667: 1, S0276: 1 and |
| | | | | | | | S0462: 1. |
| | | 1214441 | 191 | 102-377 | 378 | Met-1 to Leu-6, | |
| | | | | | | Thr-32 to Glu-39. | |
| 79 | HBPOM70 | 1283382 | 89 | 374-1384 | 276 | Tyr-41 to Thr-52, | L0777: 6, L0747: 4, |
| | | | | | | Gly-113 to Trp-120, | L0731: 4, L0803: 3, |
| | | | | | | Asn-143 to Lys-149, | L0749: 3, L0759: 3, |
| | | | | | | Glu-188 to Lys-210, | S0474: 2, L0794: 2, |
| | | | | | | Ser-222 to Leu-228, | L0744: 2, L0754: 2, |
| | | | | | | Glu-262 to Asp-267, | L0750: 2, H0638: 1, |
| | | | | | | Asp-299 to Asn-311. | H0208: 1, H0427: 1, |
| | | | | | | | S0250: 1, H0383: 1, |
| | | | | | | | H0135: 1, H0488: 1, |
| | | | | | | | S0352: 1, L0638: 1, |
| | | | | | | | L0630: 1, L0804: 1, |
| | | | | | | | L0790: 1, L0792: 1, |
| | | | | | | | H0519: 1, H0710: 1, |
| | | | | | | | L0756: 1, L0752: 1 and |
| | | | | | | | H0445: 1. |
| | | 1210399 | 192 | 373-1383 | 379 | Tyr-41 to Thr-52, | |
| | | | | | | Gly-113 to Trp-120, | |
| | | | | | | Asn-143 to Lys-149, | |
| | | | | | | Glu-188 to Lys-210, | |
| | | | | | | Ser-222 to Leu-228, | |
| | | | | | | Glu-262 to Asp-267, | |
| | | | | | | Asp-299 to Asn-311. | |
| 80 | HMSMO35 | 1243922 | 90 | 407-727 | 277 | Ser-100 to Lys-106. | S0426: 1 |
| | | 1212826 | 193 | 395-610 | 380 | | |
| 81 | HMUCI88 | 1256397 | 91 | 239-634 | 278 | Thr-48 to Ser-54, | S0222: 4, L0439: 4, |
| | | | | | | His-62 to Arg-69, | L0747: 4, H0661: 3, |
| | | | | | | Gly-90 to Ala-100, | L0803: 3, L0806: 3, |
| | | | | | | Ser-120 to Ala-126. | L0752: 3, H0052: 2, |
| | | | | | | | H0620: 2, H0539: 2, |
| | | | | | | | H0686: 1, H0650: 1, |
| | | | | | | | S0212: 1, H0483: 1, |
| | | | | | | | S0418: 1, H0580: 1, |
| | | | | | | | S0007: 1, L0717: 1, |
| | | | | | | | S6022: 1, H0438: 1, |
| | | | | | | | H0592: 1, H0586: 1, |
| | | | | | | | H0635: 1, S0346: 1, |
| | | | | | | | H0581: 1, H0014: 1, |
| | | | | | | | T0010: 1, H0266: 1, |
| | | | | | | | L0351: 1, H0494: 1, |
| | | | | | | | H0529: 1, L0769: 1, |
| | | | | | | | L0772: 1, L0764: 1, |
| | | | | | | | L0766: 1, L0774: 1, |
| | | | | | | | L0805: 1, L0659: 1, |
| | | | | | | | L0809: 1, L0647: 1, |
| | | | | | | | L0791: 1, L0793: 1, |
| | | | | | | | L0665: 1, H0144: 1, |
| | | | | | | | L0438: 1, L0352: 1, |
| | | | | | | | H0593: 1, H0689: 1, |
| | | | | | | | H0435: 1, H0522: 1, |
| | | | | | | | H0555: 1, L0741: 1, |
| | | | | | | | L0743: 1, L0744: 1, |
| | | | | | | | L0748: 1, L0751: 1, |
| | | | | | | | L0779: 1, L0755: 1, |
| | | | | | | | L0595: 1, S0424: 1 and |
| | | | | | | | H0677: 1. |
| | | 1209766 | 194 | 1815-2042 | 381 | His-49 to Cys-57. | |
| 82 | HMUDN51 | 1275158 | 92 | 54-299 | 279 | Pro-46 to Ser-52, | S0408: 4, L0774: 3, |
| | | | | | | Ile-66 to Gly-74. | H0494: 2, H0529: 2, |
| | | | | | | | L0748: 2, S0354: 1, |
| | | | | | | | S0278: 1, T0040: 1, |
| | | | | | | | H0253: 1, H0012: 1, |
| | | | | | | | H0620: 1, H0594: 1, |
| | | | | | | | H0213: 1, H0181: 1, |
| | | | | | | | H0617: 1, S0036: 1, |
| | | | | | | | H0477: 1, H0102: 1, |
| | | | | | | | S0440: 1, L0645: 1, |
| | | | | | | | L5574: 1, L0803: 1, |
| | | | | | | | L0518: 1, L0749: 1, |
| | | | | | | | L0752: 1 and H0445: 1. |
| | | 1209998 | 195 | 45-290 | 382 | Pro-46 to Ser-52, | |
| | | | | | | Ile-66 to Gly-74. | |
| 83 | HMAGC36 | 1262016 | 93 | 72-398 | 280 | Pro-32 to Leu-39, | S0278: 7, S0002: 6, |
| | | | | | | Lys-56 to Cys-63, | H0521: 6, L0774: 5, |
| | | | | | | Arg-76 to Gly-88, | S0144: 4, L0761: 4, |
| | | | | | | Glu-99 to Gly-104. | L0777: 4, S0142: 3, |
| | | | | | | | L0803: 3, H0265: 2, |
| | | | | | | | H0556: 2, H0638: 2, |
| | | | | | | | S0426: 2, L0789: 2, |
| | | | | | | | L0741: 2, L0740: 2, |
| | | | | | | | S0420: 1, S0356: 1, |
| | | | | | | | S0444: 1, S0360: 1, |
| | | | | | | | L0717: 1, H0431: 1, |
| | | | | | | | H0333: 1, H0635: 1, |
| | | | | | | | H0618: 1, H0253: 1, |
| | | | | | | | H0505: 1, H0434: 1, |
| | | | | | | | H0078: 1, H0135: 1, |
| | | | | | | | H0100: 1, H0429: 1, |
| | | | | | | | H0494: 1, H0509: 1, |
| | | | | | | | L0640: 1, L0763: 1, |
| | | | | | | | L0770: 1, L0769: 1, |
| | | | | | | | L5575: 1, L0800: 1, |
| | | | | | | | L0768: 1, L0794: 1, |
| | | | | | | | L0499: 1, L0804: 1, |
| | | | | | | | L0806: 1, L0509: 1, |
| | | | | | | | L0807: 1, L0659: 1, |
| | | | | | | | L0792: 1, L0663: 1, |
| | | | | | | | S0406: 1, L0751: 1, |
| | | | | | | | L0754: 1, L0747: 1, |
| | | | | | | | L0756: 1, L0779: 1, |
| | | | | | | | L0731: 1 and L0759: 1. |
| | | 1219629 | 196 | 898-1251 | 383 | Pro-32 to Leu-39, | |
| | | | | | | Lys-56 to Cys-63, | |
| | | | | | | Arg-76 to Gly-88, | |
| | | | | | | Thr-107 to His-112. | |
| | | 1219632 | 197 | 2544-3047 | 384 | Leu-60 to Glu-66, | |
| | | | | | | Gly-79 to Cys-86, | |
| | | | | | | Pro-99 to Pro-107, | |
| | | | | | | His-131 to Ser-140. | |

[0299] TABLE 1C

| Gene No. | Clone ID | Preferred Indication Identifier |
|---|---|---|
| 1 | HAGAN08 | Immune/Hematopoetic, |
| | | Neural/Sensory |
| 2 | HSANL54 | Cancer |
| 3 | HSYHY70 | Cancer |
| 4 | HEOUO75 | Cancer |
| 5 | HSCPC08 | Immune/Hematopoetic, |
| | | Neural/Sensory, |
| | | Reproductive |
| 6 | HSCPT22 | Reproductive |
| 7 | HTLED86 | Cancer |
| 8 | HTPKP89 | Cancer |
| 9 | HSRFP52 | Cancer |
| 10 | HDHEA83 | Cancer |
| 11 | HFXBR92 | Cardiovascular, |
| | | Mixed Fetal, |
| | | Neural/Sensory |
| 12 | HSYIH77 | Cancer |
| 13 | HTAHS92 | Immune/Hematopoetic |
| 14 | HAROV59 | Connective/Epithelial |
| 15 | HDCCG73 | Immune/Hematopoetic |
| 16 | HQAHD50 | Cancer |
| 17 | HROBA16 | Digestive |
| 18 | HTPJD12 | Digestive, |
| | | Excretory, |
| | | Reproductive |
| 19 | HHAWD13 | Cancer |
| 20 | HISFI83 | Cancer |
| 21 | HISFV70 | Cardiovascular, |
| | | Digestive |
| 22 | HNSAB41 | Cancer |
| 23 | HOCNY94 | Digestive, |
| | | Mixed Fetal, |
| | | Reproductive |
| 24 | HAROG72 | Cancer |
| 25 | HDACT07 | Cancer |
| 26 | HLTIJ80 | Immune/Hematopoetic |
| 27 | HNTZG72 | Cancer |
| 28 | HNUCE33 | Cancer |
| 29 | HODEM32 | Reproductive |
| 30 | HPJHQ20 | Reproductive |
| 31 | HQADO95 | Endocrine |
| 32 | HTENS88 | Cancer |
| 33 | HTLGC03 | Cancer |
| 34 | HTLKQ55 | Reproductive |
| 35 | HTOJF42 | Immune/Hematopoetic |
| 36 | HTPHC19 | Digestive, |
| | | Immune/Hematopoetic |
| 37 | HDPHG50 | Digestive, |
| | | Immune/Hematopoetic, |
| | | Neural/Sensory |
| 38 | HHEWS13 | Immune/Hematopoetic |
| 39 | HOGCY01 | Digestive, |
| | | Immune/Hematopoetic, |
| | | Reproductive |
| 40 | HPJGT38 | Cancer |
| 41 | HTFMK11 | Mixed Fetal, |
| | | Neural/Sensory |
| 42 | HTSGQ95 | Cancer |
| 43 | HLSAI43 | Connective/Epithelial, |
| | | Immune/Hematopoetic |
| 44 | HNBTF02 | Cancer |
| 45 | HNSCC06 | Cancer |
| 46 | HTENQ40 | Reproductive |
| 47 | HCNCM78 | Connective/Epithelial, |
| | | Digestive, |
| | | Reproductive |
| 48 | HCOKD57 | Cancer |
| 49 | HRAEO74 | Cancer |
| 50 | HTACM88 | Cancer |
| 51 | HBWBI44 | Neural/Sensory |
| 52 | HAGIF61 | Cancer |
| 53 | HSYHD12 | Cancer |
| 54 | HTAGF12 | Immune/Hematopoetic, |
| | | Neural/Sensory, |
| | | Reproductive |
| 55 | HTHCA16 | Cancer |
| 56 | HNFIQ15 | Cancer |
| 57 | HNHPS28 | Immune/Hematopoetic |
| 58 | HNTDN59 | Cancer |
| 59 | HNTQM17 | Immune/Hematopoetic, |
| | | Reproductive |
| 60 | HNTTF76 | Immune/Hematopoetic |
| 61 | HCFGD60 | Digestive, |
| | | Immune/Hematopoetic |
| 62 | HMUEP30 | Cancer |
| 63 | HNSCA10 | Cancer |
| 64 | HTPAO67 | Cancer |
| 65 | HAZCB15 | Reproductive |
| 66 | HSLFK66 | Cancer |
| 67 | HCFPE46 | Connective/Epithelial, |
| | | Immune/Hematopoetic, |
| | | Reproductive |
| 68 | HNGPB91 | Immune/Hematopoetic |
| 69 | HRADV31 | Cancer |
| 70 | HNBVG70 | Cancer |
| 71 | HCFGK19 | Immune/Hematopoetic |
| 72 | HNGOG04 | Immune/Hematopoetic |
| 73 | HDCGC29 | Immune/Hematopoetic |
| 74 | HNGNT27 | Immune/Hematopoetic |
| 75 | HMUHD72 | Cancer |
| 76 | HLYCK47 | Cancer |
| 77 | HLYFJ90 | Cancer |
| 78 | HMLHD54 | Cancer |
| 79 | HBPOM70 | Cancer |
| 80 | HMSMO35 | Immune/Hematopoetic |
| 81 | HMUCI88 | Cancer |
| 82 | HMUDN51 | Cancer |
| 83 | HMAGC36 | Cancer |

[0300] TABLE 2

| | | SEQ | | | | Score/ | | |
|---|---|---|---|---|---|---|---|---|
| Clone ID | Contig | ID | Analysis | | PFam/NR Accession | Percent | NT | NT |
| NO: Z | ID: | NO: X | Method | PFam/NR Description | Number | Identity | From | To |
| HAGAN08 | 1212501 | 11 | blastx.2 | PRO1847. | sp\|Q9P191\|Q9P191 | 53% | 1015 | 920 |
| | | | | | | 76% | 1065 | 1015 |
| HSANL54 | 1262040 | 12 | blastx.2 | Y24F12A.1 PROTEIN. | sp\|Q9U2Q7\|Q9U2Q7 | 38% | 829 | 1479 |
| | | | | | | 35% | 679 | 909 |
| HSANL54 | 1191032 | 95 | HMMER | PFAM: Uncharacterized | PF01026 | 291.1 | 274 | −271 |
| | | | 2.1.1 | protein family | | | | |
| | | | blastx.14 | similar to E. coli | gi\|1504018\|dbj\|BAA13208.1\| | 99% | 8 | 562 |
| | | | | hypothetical 29.6 KD | | | | |
| | | | | protein(P1: YIGW_ECOLI) | | | | |
| | | | | [Homo sapiens] | | | | |
| HSYHY70 | 1268180 | 13 | blastx.2 | SERINE | sp\|P34897\|GLYM_HUMAN | 99% | 100 | 1581 |
| | | | | HYDROXYMETHYLTRANSFERASE, | | | | |
| | | | | MITOCHONDRIAL | | | | |
| | | | | PRECURSOR 1 1 | | | | |
| HSYHY70 | 1225974 | 96 | blastx.2 | SERINE | sp\|P34897\|GLYM_HUMAN | 98% | 87 | 635 |
| | | | | HYDROXYMETHYLTRANSFERASE, | | | | |
| | | | | MITOCHONDRIAL | | | | |
| | | | | PRECURSOR 1 1 | | | | |
| HEOUO75 | 1283143 | 14 | WUblastx.64 | (AF166382) serpentine | gb\|AAF00617.1\|AF166382_1 | 43% | 1413 | 1688 |
| | | | | receptor [Mus musculus] | | 29% | 1651 | 2373 |
| HSCPC08 | 1262036 | 15 | blastx.2 | conserved hypothetical | pir\|D82426\|D82426 | 33% | 38 | 553 |
| | | | | protein VCA0703 | | | | |
| | | | | [imported] - Vibrio | | | | |
| | | | | cholerae (group O1 strain | | | | |
| | | | | N16961) | | | | |
| HSCPC08 | 1213061 | 98 | blastx.2 | conserved hypothetical | pir\|D82426\|D82426 | 31% | 18 | 533 |
| | | | | protein VCA0703 | | | | |
| | | | | [imported] - Vibrio | | | | |
| | | | | cholerae (group O1 strain | | | | |
| | | | | N16961) | | | | |
| HSCPT22 | 1243895 | 16 | WUblastx.64 | arginine-rich protein | gb\|AAB08753.1\| | 63% | 185 | 652 |
| | | | | [Homo sapiens] | | | | |
| HSCPT22 | 1209266 | 99 | blastx.2 | arginine-rich protein - | pir\|S27956\|S27956 | 63% | 174 | 641 |
| | | | | human | | | | |
| HTLED86 | 1253125 | 17 | blastx.2 | PUTATIVE SEVEN | sp\|O60478\|O60478 | 53% | 7 | 753 |
| | | | | PASS | | | | |
| | | | | TRANSMEMBRANE | | | | |
| | | | | PROTEIN. | | | | |
| HTLED86 | 1222077 | 100 | blastx.2 | PUTATIVE SEVEN | sp\|Q9JHD9\|Q9JHD9 | 55% | 527 | 1330 |
| | | | | PASS | | | | |
| | | | | TRANSMEMBRANE | | | | |
| | | | | PROTEIN. | | | | |
| HTLED86 | 1221659 | 101 | blastx.14 | Putative seven pass | sp\|AAF73259\|AAF73259 | 59% | 166 | 522 |
| | | | | transmembrane protein. | | 81% | 1 | 33 |
| HTPKP89 | 1263310 | 18 | WUblastx.64 | (AK027056) unnamed | dbj\|BAB15641.1\| | 96% | 205 | 549 |
| | | | | protein product [Homo | | 98% | 524 | 1117 |
| | | | | sapiens] | | | | |
| HTPKP89 | 1213121 | 102 | blastx.2 | CDNA: FLJ23403 fis, | sp\|BAB15641\|BAB15641 | 98% | 196 | 681 |
| | | | | clone HEP18857. | | | | |
| HSRFP52 | 1254537 | 19 | blastx.2 | STRABISMUS. | sp\|O45030\|O45030 | 51% | 123 | 1280 |
| | | | | | | 37% | 63 | 332 |
| HSRFP52 | 745408 | 103 | blastx.2 | STRABISMUS. | sp\|O45030\|O45030 | 48% | 479 | 1276 |
| | | | | | | 34% | 58 | 468 |
| | | | | | | 31% | 58 | 327 |
| HSRFP52 | 1182209 | 104 | blastx.14 | (AF044208) Strabismus | gi\|2854044\|gb\|AAC02533.1\| | 52% | 525 | 956 |
| | | | | [Drosophila melanogaster] | | 36% | 354 | 536 |
| | | | | | | 68% | 192 | 266 |
| | | | | | | 38% | 267 | 344 |
| HDHEA83 | 1217946 | 106 | HMMER | PFAM: Transmembrane 4 | PF00335 | 75.7 | 220 | 585 |
| | | | 2.1.1 | family | | | | |
| HFXBR92 | 1243870 | 21 | blastx.2 | PRO1722. | sp\|Q9P195\|Q9P195 | 66% | 270 | 560 |
| HFXBR92 | 1208739 | 108 | blastx.2 | PRO1722. | sp\|Q9P195\|Q9P195 | 66% | 258 | 548 |
| HSYIH77 | 1276392 | 22 | HMMER | PFAM: TPR Domain | PF00515 | 69.2 | 926 | 1009 |
| | | | 2.1.1 | | | | | |
| | | | blastx.2 | Hypothetical 57.4 kDa | sp\|BAB12304\|BAB12304 | 100% | 1043 | 2548 |
| | | | | protein. | | 25% | 839 | 1003 |
| | | | | | | 26% | 770 | 883 |
| HTAHS92 | 1243918 | 23 | blastx.2 | CDNA FLJ20378 FIS, | sp\|Q9NX85\|Q9NX85 | 57% | 618 | 328 |
| | | | | CLONE KAIA0536. | | 46% | 1428 | 1384 |
| HTAHS92 | 1213187 | 111 | blastx.2 | PRO2550. | sp\|AAG35515\|AAG35515 | 72% | 587 | 459 |
| | | | | | | 69% | 649 | 581 |
| | | | | | | 66% | 743 | 672 |
| HAROV59 | 1272018 | 24 | blastx.2 | triacylglycerol lipase (EC | pir\|S07145\|S07145 | 58% | 52 | 489 |
| | | | | 3.1.1.3) precursor, gastric - | | 43% | 489 | 884 |
| | | | | human | | 46% | 846 | 1085 |
| HAROV59 | 1209631 | 113 | HMMER | PFAM: alpha/beta | PF00561 | 31.2 | 372 | 590 |
| | | | 2.1.1 | hydrolase fold | | | | |
| | | | blastx.2 | lysosomal acid lipase (EC | pir\|S41408\|S41408 | 68% | 120 | 590 |
| | | | | 3.1.1.—)/sterol esterase | | 81% | 593 | 640 |
| | | | | (EC 1 | | | | |
| HDCCG73 | 1243884 | 25 | blastx.2 | UNNAMED PORTEIN | sp\|Q9N083\|Q9N083 | 56% | 520 | 296 |
| | | | | PRODUCT. | | 64% | 305 | 222 |
| HDCCG73 | 1209263 | 114 | blastx.2 | UNNAMED PORTEIN | sp\|Q9N083\|Q9N083 | 56% | 575 | 351 |
| | | | | PRODUCT. | | 64% | 360 | 277 |
| HROBA16 | 1243878 | 27 | blastx.2 | Hypothetical 12.9 kDa | sp\|BAB12124\|BAB12124 | 48% | 926 | 1162 |
| | | | | protein. | | 56% | 1132 | 1239 |
| HTPJD12 | 1262048 | 28 | WUblastx.64 | (AX058634) unnamed | emb\|CAC22532.1\| | 92% | 8 | 448 |
| | | | | protein product [Homo | | 83% | 386 | 694 |
| | | | | sapiens] | | | | |
| HTPJD12 | 1209268 | 118 | blastx.2 | (AX058634) unnamed | emb\|CAC22532.1\| | 92% | 3 | 446 |
| | | | | protein product [Homo | | 83% | 384 | 692 |
| | | | | sapiens] | | | | |
| HHAWD13 | 1272864 | 29 | HMMER | PFAM: Ank repeat | PF00023 | 202.9 | 1203 | 1301 |
| | | | 2.1.1 | | | | | |
| | | | blastx.2 | hypothetical protein | pir\|T42691\|T42691 | 60% | 24 | 1634 |
| | | | | DKFZp434D2328.1 - | | 29% | 30 | 1622 |
| | | | | human (fragment) | | 29% | 24 | 1580 |
| | | | | | | 28% | 15 | 1577 |
| | | | | | | 30% | 30 | 1580 |
| | | | | | | 30% | 63 | 1307 |
| | | | | | | 27% | 15 | 1577 |
| | | | | | | 28% | 12 | 1586 |
| | | | | | | 33% | 411 | 1580 |
| | | | | | | 30% | 153 | 1580 |
| | | | | | | 28% | 363 | 1610 |
| | | | | | | 28% | 504 | 1610 |
| | | | | | | 47% | 1591 | 1725 |
| | | | | | | 43% | 1603 | 1725 |
| HHAWD13 | 1209632 | 119 | HMMER | PFAM: Ank repeat | PF00023 | 62 | 382 | 480 |
| | | | 2.1.1 | | | | | |
| | | | blastx.2 | hypothetical protein | pir\|T42691\|T42691 | 75% | 1 | 627 |
| | | | | DKFZp434D2328.1 - | | 31% | 37 | 612 |
| | | | | human (fragment) | | 30% | 28 | 555 |
| | | | | | | 30% | 13 | 618 |
| | | | | | | 31% | 73 | 636 |
| | | | | | | 28% | 10 | 606 |
| | | | | | | 39% | 310 | 609 |
| | | | | | | 30% | 7 | 600 |
| | | | | | | 32% | 22 | 612 |
| | | | | | | 28% | 127 | 609 |
| | | | | | | 36% | 337 | 636 |
| | | | | | | 41% | 385 | 615 |
| HNSAB41 | 1268184 | 32 | HMMER | PFAM: Zinc finger, | PF00097 | 36.3 | 1049 | 1171 |
| | | | 2.1.1 | C3HC4 type (RING | | | | |
| | | | | finger) | | | | |
| | | | WUblastx.64 | (AK018582) putative | dbj\|BAB31291.1\| | 92% | 221 | 1504 |
| | | | | [Mus musculus] | | | | |
| HNSAB41 | 1212804 | 122 | blastx.2 | BRAIN CDNA, CLONE | sp\|Q9JJF8\|Q9JJF8 | 77% | 206 | 1015 |
| | | | | MNCB-3816, SIMILAR | | 94% | 861 | 1490 |
| | | | | TO AF171875 G1- | | | | |
| | | | | RELATED 1 | | | | |
| HAROG72 | 1281478 | 34 | blastx.2 | NEURONAL THREAD | sp\|O60448\|O60448 | 65% | 230 | 30 |
| | | | | PROTEIN AD7C-NTP. | | 67% | 2040 | 1867 |
| | | | | | | 61% | 227 | 36 |
| | | | | | | 66% | 2046 | 1885 |
| | | | | | | 66% | 199 | 29 |
| | | | | | | 70% | 2006 | 1884 |
| | | | | | | 52% | 846 | 670 |
| | | | | | | 49% | 858 | 670 |
| | | | | | | 58% | 847 | 731 |
| | | | | | | 35% | 214 | 35 |
| | | | | | | 47% | 817 | 689 |
| | | | | | | 73% | 106 | 38 |
| | | | | | | 44% | 2040 | 1939 |
| | | | | | | 52% | 1958 | 1884 |
| | | | | | | 57% | 1950 | 1894 |
| | | | | | | 51% | 750 | 670 |
| | | | | | | 37% | 874 | 668 |
| | | | | | | 40% | 2020 | 1943 |
| | | | | | | 45% | 816 | 721 |
| | | | | | | 40% | 237 | 163 |
| | | | | | | 34% | 218 | 114 |
| HAROG72 | 1209767 | 124 | blastx.2 | CDNA FLJ20489 FIS, | sp\|Q9NX17\|Q9NX17 | 71% | 202 | 14 |
| | | | | CLONE KAT08285. | | 46% | 390 | 310 |
| HDACT07 | 1280454 | 35 | blastx.2 | CDNA FLJ12761 fis, | sp\|BAB14261\|BAB14261 | 100% | 12 | 1244 |
| | | | | clone NT2RP2001378, | | | | |
| | | | | weakly similar to 1 | | | | |
| HDACT07 | 1209253 | 125 | blastx.2 | CDNA FLJ12761 fis, | sp\|BAB14261\|BAB14261 | 80% | 2 | 706 |
| | | | | clone NT2RP2001378, | | 85% | 956 | 1156 |
| | | | | weakly similar to 1 | | 88% | 303 | 410 |
| | | | | | | 25% | 309 | 461 |
| HNTZG72 | 1246154 | 37 | HMMER | PFAM: Monocarboxylate | PF01587 | 30.9 | 104 | 373 |
| | | | 2.1.1 | transporter | | | | |
| | | | blastx.2 | CDNA: FLJ21463 fis, | sp\|BAB15071\|BAB15071 | 66% | 722 | 1060 |
| | | | | clone COL04765. | | | | |
| HNTZG72 | 1209378 | 127 | HMMER | PFAM: Monocarboxylate | PF01587 | 30.9 | 85 | 354 |
| | | | 2.1.1 | transporter | | | | |
| | | | blastx.2 | BRAIN CDNA, CLONE | sp\|Q9JJC0\|Q9JJC0 | 36% | 1 | 276 |
| | | | | MNCB-2717. | | | | |
| HNUCE33 | 1275160 | 38 | blastx.2 | Hypothetical 3.2 kDa | sp\|AAG10068\|AAG10068 | 100% | 983 | 891 |
| | | | | protein. | | | | |
| HNUCE33 | 1209149 | 128 | blastx.2 | (AL121581) dJ1022E24.4 | emb\|CAC17006.1\| | 48% | 216 | 878 |
| | | | | (novel protein) [Homo | | | | |
| | | | | sapiens] | | | | |
| HODEM32 | 1253127 | 39 | blastx.2 | CDNA: FLJ21463 fis, | sp\|BAB15071\|BAB15071 | 69% | 1868 | 1581 |
| | | | | clone COL04765. | | | | |
| HQADO95 | 1276422 | 41 | blastx.2 | CDNA FLJ20489 FIS, | sp\|Q9NX17\|Q9NX17 | 68% | 1079 | 807 |
| | | | | CLONE KAT08285. | | | | |
| HTENS88 | 1243927 | 42 | blastx.2 | CG7530 PROTEIN. | sp\|Q9VFG7\|Q9VFG7 | 34% | 18 | 428 |
| | | | | | | 32% | 689 | 832 |
| HTENS88 | 1213009 | 132 | blastx.2 | CG7530 PROTEIN. | sp\|Q9VFG7\|Q9VFG7 | 34% | 11 | 421 |
| HTLGC03 | 1261928 | 43 | blastx.2 | DJ1184F4.4 (NOVEL | sp\|Q9NQF5\|Q9NQF5 | 99% | 923 | 1375 |
| | | | | PROTEIN SIMILAR TO | | 100% | 843 | 926 |
| | | | | NUCLEOLAR PROTEIN | | 27% | 1385 | 1471 |
| | | | | 4 1 | | | | |
| HTLGC03 | 1227183 | 135 | blastx.14 | probable importin beta-4 | pir\|T39449\|T39449 | 24% | 874 | 401 |
| | | | | subunit - fission yeast | | 36% | 2080 | 1886 |
| | | | | (Schizosaccharomyces | | 30% | 2320 | 2156 |
| | | | | pombe) | | 30% | 1501 | 1298 |
| | | | | | | 33% | 1768 | 1634 |
| | | | | | | 29% | 1483 | 1319 |
| | | | | | | 20% | 2314 | 2171 |
| | | | | | | 28% | 1426 | 1343 |
| | | | | | | 32% | 2026 | 1916 |
| | | | | | | 33% | 2507 | 2445 |
| | | | | | | 33% | 829 | 749 |
| | | | | | | 27% | 1483 | 1376 |
| | | | | | | 53% | 1861 | 1823 |
| | | | | | | 28% | 1786 | 1703 |
| | | | | | | 24% | 1219 | 1133 |
| | | | | | | 34% | 1171 | 1094 |
| HTLKQ55 | 1243896 | 44 | blastx.2 | CDNA FLJ20160 FIS, | sp\|Q9NXM3\|Q9NXM3 | 26% | 474 | 977 |
| | | | | CLONE COL09072. | | 38% | 1050 | 1151 |
| HTOJF42 | 1261944 | 45 | blastx.2 | PRO2550. | sp\|AAG35515\|AAG35515 | 66% | 407 | 655 |
| | | | | | | 80% | 657 | 719 |
| HDPHG50 | 1268191 | 47 | blastx.2 | HYPOTHETICAL 18.9 KDA | sp\|Q9Z0T1\|Q9Z0T1 | 98% | 597 | 1097 |
| | | | | PROTEIN | | | | |
| | | | | (FRAGMENT). | | | | |
| HDPHG50 | 1213570 | 139 | HMMER | PFAM: Protein | PF00481 | 119.3 | 460 | 945 |
| | | | 2.1.1 | phosphatase 2C | | | | |
| | | | blastx.2 | HYPOTHETICAL 18.9 KDA | sp\|Q9Z0T1\|Q9Z0T1 | 97% | 586 | 948 |
| | | | | PROTEIN | | | | |
| | | | | (FRAGMENT). | | | | |
| HPJGT38 | 1209290 | 50 | blastx.2 | CDNA FLJ20378 FIS, | sp\|Q9NX85\|Q9NX85 | 56% | 87 | 344 |
| | | | | CLONE KAIA0536. | | 73% | 347 | 403 |
| HTFMK11 | 1276752 | 51 | blastx.2 | CDNA: FLJ21463 fis, | sp\|BAB15071\|BAB15071 | 70% | 486 | 749 |
| | | | | clone COL04765. | | 65% | 728 | 787 |
| HTFMK11 | 1212928 | 142 | blastx.2 | CDNA FLJ12155 fis, | sp\|BAB13989\|BAB13989 | 77% | 541 | 702 |
| | | | | clone MAMMA1000472. | | | | |
| HTSGQ95 | 1280458 | 52 | blastx.2 | TNF-a-inducible RNA | sp\|AAG15396\|AAG15396 | 100% | 2357 | 2722 |
| | | | | binding protein. | | 98% | 1335 | 1631 |
| HTSGQ95 | 1213625 | 144 | blastx.2 | CDNA FLJ20489 FIS, | sp\|Q9NX17\|Q9NX17 | 67% | 10 | 291 |
| | | | | CLONE KAT08285. | | | | |
| HLSAI43 | 1243888 | 53 | blastx.2 | CDNA FLJ20489 FIS, | sp\|Q9NX17\|Q9NX17 | 59% | 763 | 512 |
| | | | | CLONE KAT08285. | | 87% | 764 | 741 |
| | | | | | | 81% | 489 | 457 |
| HLSAI43 | 1213409 | 146 | blastx.2 | UNNAMED PROTEIN | sp\|Q9N032\|Q9N032 | 61% | 595 | 494 |
| | | | | PRODUCT. | | 61% | 480 | 442 |
| | | | | | | 85% | 494 | 474 |
| HNBTF02 | 1253163 | 54 | WUblastx.64 | (AK024780) unnamed | dbj\|BAB15000.1\| | 98% | 604 | 1230 |
| | | | | protein product [Homo | | 100% | 251 | 601 |
| | | | | sapiens] | | 89% | 1330 | 1791 |
| HNBTF02 | 1226356 | 147 | blastx.2 | CDNA: FLJ21127 fis, | sp\|BAB15000\|BAB15000 | 98% | 373 | 1353 |
| | | | | clone CAS06212. | | 89% | 1453 | 1914 |
| HNSCC06 | 1263307 | 55 | WUblastx.64 | (AK022749) unnamed | dbj\|BAB14223.1\| | 100% | 106 | 540 |
| | | | | protein product [Homo | | 99% | 533 | 1618 |
| | | | | sapiens] | | | | |
| HNSCC06 | 1209025 | 148 | blastx.2 | CDNA FLJ12687 fis, | sp\|BAB14223\|BAB14223 | 98% | 89 | 892 |
| | | | | clone NT2RM4002532, | | 70% | 894 | 1046 |
| | | | | weakly similar to 1 | | 66% | 973 | 1008 |
| HTENQ40 | 1243926 | 56 | HMMER | PFAM: 7 transmembrane | PF00001 | 67 | 204 | 458 |
| | | | 2.1.1 | receptor (rhodopsin | | | | |
| | | | | family) | | | | |
| | | | blastx.2 | (AF247656) odorant | gb\|AAG09780.1\|AF247656_1 | 51% | 84 | 554 |
| | | | | receptor M72 [Mus | | 51% | 520 | 999 |
| | | | | musculus] | | | | |
| HTENQ40 | 1213048 | 149 | HMMER | PFAM: 7 transmembrane | PF00001 | 67 | 197 | 451 |
| | | | 2.1.1 | receptor (rhodopsin | | | | |
| | | | | family) | | | | |
| | | | blastx.2 | OLFACTORY | sp\|Q90806\|Q90806 | 45% | 65 | 637 |
| | | | | RECEPTOR 2 | | | | |
| | | | | (FRAGMENT). | | | | |
| HCOKD57 | 1271607 | 58 | blastx.2 | (AF299340) CD164 | gb\|AAG53905.1\| | 70% | 64 | 621 |
| | | | | isoform delta 4 [Homo | | | | |
| | | | | sapiens] | | | | |
| HCOKD57 | 1213043 | 152 | blastx.2 | (AF299340) CD164 | gb\|AAG53905.1\| | 48% | 243 | 572 |
| | | | | isoform delta 4 [Homo | | | | |
| | | | | sapiens] | | | | |
| HRAEO74 | 1209635 | 59 | blastx.2 | MIB002 PROTEIN. | sp\|Q9NQ90\|Q9NQ90 | 36% | 425 | 1228 |
| | | | | | | 42% | 288 | 329 |
| HTACM88 | 1253076 | 60 | blastx.2 | UROKINASE-TYPE | sp\|Q12876\|Q12876 | 100% | 1409 | 1807 |
| | | | | PLASMINOGEN | | | | |
| | | | | ACTIVATOR | | | | |
| | | | | RECEPTOR. | | | | |
| HTACM88 | 1213431 | 153 | blastx.2 | NEURONAL THREAD | sp\|O60448\|O60448 | 70% | 126 | 257 |
| | | | | PROTEIN AD7C-NTP. | | 67% | 138 | 257 |
| | | | | | | 60% | 10 | 78 |
| | | | | | | 38% | 4 | 81 |
| | | | | | | 42% | 9 | 71 |
| | | | | | | 52% | 13 | 69 |
| HBWBI44 | 1159379 | 155 | blastx.2 | PRO1902 PROTEIN. | sp\|Q9UHT1\|Q9UHT1 | 72% | 118 | 249 |
| | | | | | | 67% | 246 | 338 |
| HSYHD12 | 1280343 | 63 | HMMER | PFAM: Filamin/ABP280 | PF00630 | 31.5 | 376 | 603 |
| | | | 2.1.1 | repeat. | | | | |
| | | | WUblastx.64 | (BC001297) Unknown | gb\|AAH01297.1\|AAH01297 | 100% | 301 | 1683 |
| | | | | (protein for MGC: 5302) | | | | |
| | | | | [Homo sapiens] | | | | |
| HSYHD12 | 1209769 | 157 | HMMER | PFAM: Filamin/ABP280 | PF00630 | 31.5 | 387 | 614 |
| | | | 2.1.1 | repeat. | | | | |
| | | | blastx.2 | ER PROTEIN 58. | sp\|Q9JHP7\|Q9JHP7 | 89% | 312 | 1379 |
| | | | | | | 94% | 1364 | 1816 |
| HTAGF12 | 1276746 | 64 | blastx.2 | CDNA: FLJ21463 fis, | sp\|BAB15071\|BAB15071 | 56% | 2467 | 2297 |
| | | | | clone COL04765. | | 60% | 2628 | 2464 |
| HTHCA16 | 1243880 | 65 | WUblastx.64 | (BC001129) Unknown | gb\|AAH01129.1\|AAH01129 | 90% | 17 | 994 |
| | | | | (protein for MGC: 2463) | | | | |
| | | | | [Homo sapiens] | | | | |
| HNHPS28 | 1243890 | 67 | WUblastx.64 | (AF130051) PRO0898 | gb\|AAG35479.1\|AF130117_10 | 81% | 837 | 805 |
| | | | | [Homo sapiens] | | 66% | 1069 | 833 |
| HNTDN59 | 1280527 | 68 | WUblastx.64 | (AL136581) hypothetical | emb\|CAB66516.1\| | 100% | 1611 | 2447 |
| | | | | protein [Homo sapiens] | | | | |
| HNTDN59 | 1215793 | 165 | blastx.2 | CDNA FLJ12799 fis, | sp\|BAB14277\|BAB14277 | 100% | 1682 | 2437 |
| | | | | clone NT2RP2002078, | | | | |
| | | | | weakly similar to 1 | | | | |
| HNTDN59 | 1210379 | 167 | HMMER | PFAM: Enoyl-CoA | PF00378 | 330.6 | −73 | −573 |
| | | | 2.1.1 | hydratase/isomerase | | | | |
| | | | | family | | | | |
| HNTQM17 | 1283173 | 69 | WUblastx.64 | (AF153906) erythroid | gb\|AAF31162.1\|AF153906_1 | 56% | 245 | 682 |
| | | | | membrane-associated | | 27% | 536 | 829 |
| | | | | protein ERMAP [Mus | | 32% | 3370 | 3453 |
| | | | | musculus] | | 80% | 787 | 1668 |
| HNTQM17 | 1209252 | 168 | blastx.2 | ERYTHROID | sp\|Q9JLN5\|Q9JLN5 | 55% | 235 | 594 |
| | | | | MEMBRANE- | | 32% | 11 | 76 |
| | | | | ASSOCIATED PROTEIN | | | | |
| | | | | ERMAP. | | | | |
| HNTTF76 | 1243907 | 70 | blastx.2 | CDNA: FLJ21394 fis, | sp\|BAB15056\|BAB15056 | 65% | 1053 | 847 |
| | | | | clone COL03536. | | 55% | 1109 | 1056 |
| HMUEP30 | 1262057 | 72 | blastx.2 | 54TMP. | sp\|O95070\|O95070 | 57% | 100 | 942 |
| HMUEP30 | 1209865 | 171 | blastx.2 | 54TMP. | sp\|O95070\|O95070 | 58% | 90 | 518 |
| HNSCA10 | 1268201 | 73 | HMMER | PFAM: GNS1/SUR4 | PF01151 | 191.8 | 279 | 923 |
| | | | 2.1.1 | family | | | | |
| | | | WUblastx.64 | (AK027031) unnamed | dbj\|BAB15632.1\| | 100% | 129 | 923 |
| | | | | protein product [Homo | | | | |
| | | | | sapiens] | | | | |
| HNSCA10 | 1209403 | 172 | HMMER | PFAM: GNS1/SUR4 | PF01151 | 132.7 | 266 | 652 |
| | | | 2.1.1 | family | | | | |
| | | | blastx.2 | CDNA: FLJ23378 fis, | sp\|BAB15632\|BAB15632 | 97% | 116 | 652 |
| | | | | clone HEP16248. | | | | |
| HTPAO67 | 1280558 | 74 | blastx.2 | DJ737E23.1 (EGF-LIKE | sp\|Q9NPY3\|Q9NPY3 | 100% | 3 | 401 |
| | | | | DOMAINS | | | | |
| | | | | CONTAINING | | | | |
| | | | | C1Q/MBL/SPA | | | | |
| | | | | RECEPTOR 1 | | | | |
| HAZCB15 | 1243853 | 75 | blastx.2 | PRO2550. | sp\|AAG35515\|AAG35515 | 74% | 59 | 379 |
| HAZCB15 | 1209801 | 175 | blastx.2 | PRO2550. | sp\|AAG35515\|AAG35515 | 76% | 58 | 354 |
| HSLFK66 | 1271609 | 76 | blastx.2 | ybhR protein - | pir\|H64815\|H64815 | 100% | 597 | 1700 |
| | | | | Escherichia coli | | 29% | 2 | 478 |
| HSLFK66 | 1224406 | 176 | blastx.2 | ABC-type transport | pir\|B64816\|B64816 | 99% | 151 | 1899 |
| | | | | protein ybhF - Escherichia | | | | |
| | | | | coli | | | | |
| HCFPE46 | 1243901 | 77 | blastx.2 | (AF275266) PDRP | gb\|AAG50204.1\| | 82% | 425 | 559 |
| | | | | [Rattus norvegicus] | | 70% | 227 | 328 |
| | | | | | | 61% | 65 | 169 |
| HCFPE46 | 1223989 | 177 | blastx.2 | (AF275266) PDRP | gb\|AAG50204.1\| | 57% | 414 | 548 |
| | | | | [Rattus norvegicus] | | 59% | 66 | 158 |
| HNGPB91 | 1253113 | 78 | blastx.2 | CDNA: FLJ21463 fis, | sp\|BAB15071\|BAB15071 | 48% | 5 | 229 |
| | | | | clone COL04765. | | 66% | 1797 | 1480 |
| HNGPB91 | 1212875 | 178 | blastx.2 | CDNA: FLJ21394 fis, | sp\|BAB15056\|BAB15056 | 46% | 4 | 222 |
| | | | | clone COL03536. | | | | |
| HRADV31 | 1275159 | 79 | blastx.2 | hypothetical protein | pir\|T17335\|T17335 | 99% | 1471 | 2019 |
| | | | | DKFZp434G145.1 - | | | | |
| | | | | human (fragment) | | | | |
| HCFGK19 | 1253156 | 81 | blastx.2 | CDNA: FLJ21463 fis, | sp\|BAB15071\|BAB15071 | 78% | 1675 | 1391 |
| | | | | clone COL04765. | | | | |
| HNGNT27 | 1261927 | 84 | blastx.2 | NEURONAL THREAD | sp\|O60448\|O60448 | 65% | 1711 | 1556 |
| | | | | PROTEIN AD7C-NTP. | | 52% | 1732 | 1538 |
| | | | | | | 52% | 1087 | 911 |
| | | | | | | 49% | 1087 | 899 |
| | | | | | | 44% | 1710 | 1516 |
| | | | | | | 41% | 999 | 829 |
| | | | | | | 51% | 1677 | 1555 |
| | | | | | | 50% | 1648 | 1547 |
| | | | | | | 41% | 1710 | 1558 |
| HMUHD72 | 1281806 | 85 | blastx.2 | conserved hypothetical | pir\|F81200\|F81200 | 33% | 854 | 1225 |
| | | | | protein NMB0419 | | 35% | 827 | 1228 |
| | | | | [imported] - Neisseria | | | | |
| | | | | meningitidis (group B | | | | |
| | | | | strain MD58) | | | | |
| HMUHD72 | 1209710 | 187 | blastx.2 | hypothetical protein | pir\|T46587\|T46587 | 28% | 773 | 1360 |
| | | | | [imported] - Vogesella | | 26% | 890 | 1414 |
| | | | | indigofera | | | | |
| HLYCK47 | 1272921 | 86 | HMMER | PFAM: C1q domain | PF00386 | 247.7 | 387 | 752 |
| | | | 2.1.1 | | | | | |
| | | | blastx.2 | complement | pir\|S14351\|C1HUQC | 93% | 72 | 761 |
| | | | | subcomponent C1q chain | | | | |
| | | | | C precursor - human | | | | |
| HLYCK47 | 1221159 | 188 | HMMER | PFAM: Collagen triple | PF01391 | 42 | 227 | 406 |
| | | | 2.1.1 | helix repeat (20 copies) | | | | |
| | | | blastx.2 | complement | pir\|S14351\|C1HUQC | 66% | 129 | 830 |
| | | | | subcomponent C1q chain | | 53% | 119 | 358 |
| | | | | C precursor - human | | | | |
| HLYCK47 | 1221167 | 189 | HMMER | PFAM: C1q domain | PF00386 | 247.7 | 468 | 833 |
| | | | 2.1.1 | | | | | |
| | | | blastx.2 | complement | pir\|S14351\|C1HUQC | 100% | 444 | 842 |
| | | | | subcomponent C1q chain | | 53% | 108 | 347 |
| | | | | C precursor - human | | 30% | 118 | 411 |
| | | | | | | 25% | 118 | 399 |
| | | | | | | 52% | 198 | 254 |
| | | | | | | 52% | 198 | 263 |
| | | | | | | 34% | 208 | 330 |
| | | | | | | 36% | 175 | 249 |
| HMLHD54 | 1243834 | 88 | HMMER | PFAM: Alpha-L- | PF01120 | 77 | 111 | 314 |
| | | | 2.1.1 | fucosidase | | | | |
| | | | blastx.2 | DJ2ON2.5 (NOVEL | sp\|Q9UJM5\|Q9UJM5 | 99% | 298 | 1287 |
| | | | | PROTEIN SIMILAR TO | | 98% | 75 | 305 |
| | | | | FUCOSIDASE, ALPHA- | | | | |
| | | | | L-1, 1 | | | | |
| HMLHD54 | 1214441 | 191 | HMMER | PFAM: Alpha-L- | PF01120 | 77 | 138 | 341 |
| | | | 2.1.1 | fucosidase | | | | |
| | | | blastx.2 | DJ20N2.5 (NOVEL | sp\|Q9UJM5\|Q9UJM5 | 98% | 325 | 615 |
| | | | | PROTEIN SIMILAR TO | | 98% | 183 | 332 |
| | | | | FUCOSIDASE, ALPHA- | | 100% | 620 | 703 |
| | | | | L-1, 1 | | | | |
| HBPOM70 | 1283382 | 89 | HMMER | PFAM: Sodium/hydrogen | PF00999 | 223.1 | 374 | 919 |
| | | | 2.1.1 | exchanger family | | | | |
| | | | blastx.2 | SODIUM/HYDROGEN | sp\|Q92581\|NAH6_HUMAN | 63% | 20 | 1360 |
| | | | | EXCHANGER 6 | | | | |
| | | | | (NA(+)/H(+) | | | | |
| | | | | EXCHANGER 6) 1 | | | | |
| HBPOM70 | 1210399 | 192 | HMMER | PFAM: Sodium/hydrogen | PF00999 | 223.1 | 373 | 918 |
| | | | 2.1.1 | exchanger family | | | | |
| | | | blastx.2 | SODIUM/HYDROGEN | sp\|Q92581\|NAH6_HUMAN | 61% | 34 | 1218 |
| | | | | EXCHANGER 6 | | | | |
| | | | | (NA(+)/H(+) | | | | |
| | | | | EXCHANGER 6) 1 | | | | |
| HMSMO35 | 1243922 | 90 | blastx.2 | NEURONAL THREAD | sp\|O60448\|O60448 | 63% | 1209 | 1481 |
| | | | | PROTEIN AD7C-NTP. | | 63% | 1181 | 1420 |
| | | | | | | 60% | 1172 | 1366 |
| | | | | | | 54% | 514 | 723 |
| | | | | | | 51% | 520 | 705 |
| | | | | | | 38% | 1065 | 1409 |
| | | | | | | 54% | 530 | 667 |
| | | | | | | 43% | 581 | 814 |
| | | | | | | 34% | 584 | 799 |
| | | | | | | 42% | 1293 | 1409 |
| | | | | | | 45% | 621 | 779 |
| | | | | | | 46% | 645 | 779 |
| | | | | | | 38% | 577 | 753 |
| | | | | | | 52% | 520 | 588 |
| | | | | | | 47% | 1353 | 1478 |
| | | | | | | 58% | 1181 | 1267 |
| | | | | | | 39% | 1351 | 1458 |
| | | | | | | 39% | 729 | 797 |
| | | | | | | 48% | 705 | 779 |
| HMUDN51 | 1275158 | 92 | blastx.2 | CDNA FLJ13875 fis, | sp\|BAB14734\|BAB14734 | 99% | 218 | 1117 |
| | | | | clone THYRO1001374, | | | | |
| | | | | weakly similar to 1 | | | | |
| HMUDN51 | 1209998 | 195 | blastx.2 | CDNA FLJ13875 fis, | sp\|BAB14734\|BAB14734 | 98% | 209 | 490 |
| | | | | clone THYRO1001374, | | | | |
| | | | | weakly similar to 1 | | | | |
| HMAGC36 | 1219632 | 197 | blastx.14 | hypothetical protein | pir\|T16084\|T16084 | 53% | 212 | 526 |
| | | | | F16H11.1 - | | 41% | 761 | 949 |
| | | | | Caenorhabditis elegans | | 57% | 1103 | 1243 |
| | | | | | | 36% | 8 | 202 |
| | | | | | | 36% | 584 | 682 |
| | | | | | | 32% | 1133 | 1243 |
| | | | | | | 46% | 662 | 706 |

[0301] TABLE 3

| | | NT | | |
|---|---|---|---|---|
| | | SEQ | | |
| | | ID | | |
| | cDNA Clone | NO: | | |
| Gene No. | ID | X | Contig ID | Public Accession Numbers |
| 1 | HAGAN08 | 11 | 1212501 | Z69655 |
| 2 | HSANL54 | 12 | 1262040 | BF476265, AI797047, AU130755, BE048483, |
| | | | | BE697125, AI738659, AW500849, AL533682, |
| | | | | BF894584, BF956040, BF360667, AW375079, |
| | | | | BF752028, AW378658, BE831601, AA502615, |
| | | | | BF895374, BE006128, AW504330, BF761857, |
| | | | | BF982636, D86972, and AC008116. |
| 2 | HSANL54 | 94 | 1213405 | AI738659, AI627779, AW083624, AW204211, |
| | | | | AA054944, AW204545, AI742189, AW007439, |
| | | | | AW518027, BF894584, AI092337, AW274827, |
| | | | | AI830887, AA776446, AI827903, BF478230, |
| | | | | AW589942, AI936767, AI766902, AW245965, |
| | | | | BF732759, AI499238, BE502033, AI871105, |
| | | | | AU152652, AI968436, BE348742, BF216850, |
| | | | | AI580690, BE673999, AA778810, AI022038, |
| | | | | BE326496, AW339794, BE327376, T32765, |
| | | | | AI373613, BE856484, AA894920, AA677783, |
| | | | | BG150571, Z19484, AA019610, T03681, |
| | | | | AA523505, H98846, H99004, AI634772, |
| | | | | BE467301, AW167571, N59382, N24858, |
| | | | | AI796457, BF433527, BF244404, AI783639, |
| | | | | AI274439, R69539, Z39827, BF218582, BF216244, |
| | | | | BF215884, BF185903, BF752028, AI202218, |
| | | | | AW375079, BF217306, BF217602, R90822, |
| | | | | BF901088, H09277, BF245839, AI655908, |
| | | | | AI474534, BE697125, H27493, R01271, AI202208, |
| | | | | BF215441, T97706, R90809, F01772, H15567, |
| | | | | BE831601, BF082752, BE092521, BG170453, |
| | | | | AA627824, BF895374, AW843847, BE006128, |
| | | | | BF956040, AI760935, T31294, BF218863, |
| | | | | BE092006, AW504330, BE092011, BF218445, |
| | | | | D86972, and AC008116. |
| 2 | HSANL54 | 95 | 1191032 | BF476265, AI797047, AU130755, BE048483, |
| | | | | AW500849, AL533682, AW378658, BF360667, |
| | | | | BE697125, AA502615, BF761857, BF982636, |
| | | | | AC008116, and D86972. |
| 3 | HSYHY70 | 13 | 1268180 | AL515677, AL517191, AL517711, AL514438, |
| | | | | AL514588, AL517885, AL519061, AL515998, |
| | | | | AL519098, AL516935, AL515676, AL517120, |
| | | | | AL517190, AL517884, AL517710, AL519060, |
| | | | | BE738403, BE561838, BE798895, AU118358, |
| | | | | BF307302, BG257246, BE250748, AW411251, |
| | | | | BE300412, BE250263, BF343263, BE300033, |
| | | | | BE250390, BE795083, BF303631, BF309556, |
| | | | | AU125632, AL516936, BE797752, AL515997, |
| | | | | AW411250, BG034145, AL517121, BE299994, |
| | | | | BE560803, BE300378, AU142313, BE792083, |
| | | | | BG255993, BG055192, BE299989, BF203939, |
| | | | | AU124938, BE785439, BE250578, BF310044, |
| | | | | BE250397, BE562180, BE300321, AI653986, |
| | | | | AI638143, BE797897, BF307049, BE299885, |
| | | | | BF037599, BE735822, BE799541, BE300481, |
| | | | | BE297154, BE513833, BF310125, BE780981, |
| | | | | BF204514, BE561576, BE293953, AU130353, |
| | | | | BE300435, BF304097, BE299626, BE786047, |
| | | | | AW411277, BF309568, BF305349, BE798279, |
| | | | | AU143226, AU117330, AU143785, BF305596, |
| | | | | BE902829, BE299921, BE273916, AV707635, |
| | | | | BF528416, BE298040, AL135023, AW410516, |
| | | | | BF308940, BE675245, AU125188, AI609108, |
| | | | | BF308856, BE250291, BF307501, AU125219, |
| | | | | BE300090, BE900387, BE792628, BE798367, |
| | | | | AL515142, BE250640, BF310726, AW410724, |
| | | | | BE294991, BE891362, AW411276, AW411540, |
| | | | | BE439939, BF307530, AW410822, BF308240, |
| | | | | BE731826, AU132298, BF305676, BE257914, |
| | | | | BE897171, BE298518, BF795096, BE396043, |
| | | | | BE252605, BE278737, BE731843, AW411012, |
| | | | | BF304483, BE787933, BE300122, BE385206, |
| | | | | BF310041, BF306036, BE786905, AW411541, |
| | | | | BE791288, BE790276, AW410899, AI591086, |
| | | | | BE795734, BF307367, BE797954, AI951452, |
| | | | | BE298091, BF203813, AW411176, BE740411, |
| | | | | BF304937, BE297914, BE799403, BE261174, |
| | | | | AI421521, BE299946, BF795637, BE295043, |
| | | | | AW411490, AU126059, AU125191, AU128674, |
| | | | | BF305858, BE250322, BF303832, BG105971, |
| | | | | BF307028, BF308569, AW249463, BE293980, |
| | | | | BE741670, BE299152, AW410455, BE797591, |
| | | | | BE544882, BE297823, BF310023, AI691054, |
| | | | | BE673335, BE903787, BE296989, BE793976, |
| | | | | AW474021, AU122609, BE297349, BF796273, |
| | | | | AW410898, BF304526, BE295105, BE799645, |
| | | | | BF309859, BF308782, BE297671, BF526018, |
| | | | | AU134144, BE250671, BE294777, BF305577, |
| | | | | BE293999, BE544505, BF204057, BF204274, |
| | | | | BF309146, AI700140, BE298644, BG236298, |
| | | | | BF304457, BF307427, BF308404, BE294532, |
| | | | | BE622198, BE297295, AU142593, BF303687, |
| | | | | BF981474, BE869331, BF205556, BE019318, |
| | | | | AI950991, BF313634, AW410459, BE297999, |
| | | | | AU142292, BE294766, AW249523, BE269794, |
| | | | | BE298714, BE299087, BE300314, BE379055, |
| | | | | AI632983, BE296223, AW410456, AW411486, |
| | | | | BG257264, BE266415, BF206062, BE294403, |
| | | | | BE267620, AW411175, AI887587, AW273145, |
| | | | | BE298448, BF981469, BF206061, BE740956, |
| | | | | BF311467, BE257079, BF204911, BE744199, |
| | | | | AI817987, BF204997, L11932, X91902, U23143, |
| | | | | Z62251, and Y12331. |
| 3 | HSYHY70 | 96 | 1225974 | BE250263, BE250578, BF308856, BE297823, |
| | | | | BF203915, BF304457, BF305858, BF304526, |
| | | | | BE297349, BE298518, BE298644, BE295105, |
| | | | | BF309183, BF307427, BF310125, BE294298, |
| | | | | BF204274, BF306271, BE297999, BF310023, |
| | | | | BE298714, BF303687, BE792083, BE741670, |
| | | | | AL515677, BF795096, BE296989, AL515998, |
| | | | | BF528416, AU125632, BF795637, BE900387, |
| | | | | BE385206, BE797591, AW411276, BE261174, |
| | | | | AW411540, BE295043, BF345533, BE267620, |
| | | | | BE903787, AL519061, AL519098, BE299921, |
| | | | | BE297059, BF307530, AL514588, AU124938, |
| | | | | AU125219, BE797752, AU142313, AW410456, |
| | | | | AW410459, AL516936, AW411486, BF796273, |
| | | | | AL517191, BE299946, BE798367, BE299885, |
| | | | | BE296845, BE294766, BE273916, AL514438, |
| | | | | BE798279, BE793976, BE797954, BE300481, |
| | | | | BF310811, BE266415, BE294403, BF311467, |
| | | | | BE293980, AL517121, AU143785, AU142292, |
| | | | | AU130353, BE300122, AU125188, BE791288, |
| | | | | BE299152, BF310041, BG105971, BE250291, |
| | | | | BF313634, BF309411, BE298091, BE299396, |
| | | | | BE294777, BE297295, BE297914, BE792628, |
| | | | | BE897171, AU122609, BE790276, BE731843, |
| | | | | BF304937, BE293999, BG257264, BE731826, |
| | | | | AU143226, BF204997, BF794615, BE781769, |
| | | | | AU125191, BF205556, BE622198, BF306036, |
| | | | | BE300321, BE294251, AU128674, BF037511, |
| | | | | BE297671, BE740956, AL517885, BF309825, |
| | | | | AL517711, BE869331, AU142593, BE299154, |
| | | | | BE269794, BF204514, BE797897, BE390715, |
| | | | | BE297764, BE298849, BF308404, BE298565, |
| | | | | BF304097, BF308782, BG257668, BE269795, |
| | | | | BE294902, BE799541, BF981469, AU126059, |
| | | | | BE799645, BF206061, BE296459, BE294532, |
| | | | | BE296223, AU128953, BE262427, BF203228, |
| | | | | BF348216, AL515142, BF981474, BE299989, |
| | | | | BE264672, BE799403, AW248301, BE873344, |
| | | | | BE297754, BE297692, BE270112, BE295079, |
| | | | | BF308524, BF305472, BE252525, BF309146, |
| | | | | BF307025, BG253281, BE296531, AW410516, |
| | | | | AU129668, BE544505, BF307049, BE266577, |
| | | | | BE259626, BF305935, BF307994, AW411154, |
| | | | | BE787555, BE297380, BE265361, BE545633, |
| | | | | BF204911, BE886775, BE298448, BF205203, |
| | | | | BF983945, BE299348, BF306653, BE263585, |
| | | | | BF205528, BF308569, BE250281, BG259188, |
| | | | | BE296383, BF205725, BF310033, BF304512, |
| | | | | BF306328, BF203752, BF307055, BF307484, |
| | | | | BE266491, BF310067, BG122422, BE296296, |
| | | | | BG164210, BE300314, BE900998, BF307238, |
| | | | | BF305231, BF305236, AW411158, AW410722, |
| | | | | BF308447, BG106984, BF343263, BF305577, |
| | | | | BE259437, BF309207, BF304874, AU134144, |
| | | | | BG259155, BF205692, BF304492, BF307377, |
| | | | | BF306294, BF307502, BE296852, BF308419, |
| | | | | BE543993, BE298086, BE296381, BE297237, |
| | | | | BF203541, BF308047, BE299099, BE296409, |
| | | | | BF305112, BE019068, BF305139, BF305155, |
| | | | | BE298571, BF305352, BF307845, BG025690, |
| | | | | BF528340, BF203890, BF315680, BE295617, |
| | | | | BE270394, BE892841, BF303868, BE894176, |
| | | | | BF303938, BF307750, U23143, L11932, X91902, |
| | | | | Z62251, and Y12331. |
| 4 | HEOUO75 | 14 | 1283143 | BF183209, BE672513, AW962455, AW468228, |
| | | | | AA593830, BE831720, AW339591, AW440986, |
| | | | | BE241639, AA367270, AW440877, AW592568, |
| | | | | AI807052, and AF111851. |
| 4 | HEOUO75 | 97 | 1228107 | and BE241639. |
| 5 | HSCPC08 | 15 | 1262036 | AW027686, AI333632, AI828510, AA699811, |
| | | | | AI056812, AI571877, AI684189, AI684527, |
| | | | | AI033940, AI090421, AI752451, AA953377, |
| | | | | AL157674, BF970990, BF055737, AL042628, |
| | | | | AL042382, AI857296, AI282655, AI433976, |
| | | | | AI866457, AI340582, AL119457, AI591316, |
| | | | | AI570384, AI287326, AI289937, AW190042, |
| | | | | AI933589, AL039086, AW105601, AI702406, |
| | | | | AI610756, AI439478, AW071417, AI829327, |
| | | | | AI468872, AL119863, AI500077, AW169634, |
| | | | | AW084219, AI274541, AI475817, BF339322, |
| | | | | AI280747, AI572787, AW075351, BG030364, |
| | | | | AW827228, AI859511, AI571909, AI569583, |
| | | | | BF527014, AI610645, AI800453, AI800433, |
| | | | | AA427700, BE964621, AL135661, BF817926, |
| | | | | BE895585, AW167410, AI590118, AW162071, |
| | | | | AL044207, BG113385, AI801152, AA225339, |
| | | | | AI668893, BG058398, AI815855, BG164558, |
| | | | | AI524671, BE781369, AI680498, AW827276, |
| | | | | AI632408, BG249582, AL038445, AI312428, |
| | | | | BE785868, AV746964, BE047737, AW150578, |
| | | | | AW303152, BF701153, BE048071, AW301409, |
| | | | | AW002342, AI923768, AV760102, BF970449, |
| | | | | AW103371, AI250663, BG110684, AI587143, |
| | | | | AW132056, BG027280, AI619817, AI343059, |
| | | | | AI813579, AL120854, AI609592, AW074993, |
| | | | | BG164371, AI744923, AI349933, AI349614, |
| | | | | BE910703, AV682229, BG168185, BF342070, |
| | | | | AI439745, AW827206, BG168549, BF811780, |
| | | | | BE047952, AI348897, AI349004, AV738991, |
| | | | | AI282326, AI362637, AI475430, AI274508, |
| | | | | AI564247, AI282281, AI539808, AA508692, |
| | | | | AI312152, AI270707, BF885675, AW075084, |
| | | | | AW148320, AW268220, AI349937, BG168696, |
| | | | | AV757639, AV708075, AV755311, AW129916, |
| | | | | AW301505, AI439717, AI307708, AI922901, |
| | | | | AI336513, BF726348, AI281773, AV682567, |
| | | | | AL036802, BG026428, AI348895, AW269097, |
| | | | | AI648684, AV681759, AW827289, AI431424, |
| | | | | AI608936, AI307520, BG023758, BF341801, |
| | | | | BE910373, BE876038, AI306613, AI872711, |
| | | | | AW268253, AI696612, AI567612, AI433384, |
| | | | | BG180034, AW169653, BF968205, AL036396, |
| | | | | AI620284, BG024332, AW827203, AI349645, |
| | | | | AW302992, AI874166, BG179633, AI537677, |
| | | | | BF882343, AI874109, N42321, AI811353, |
| | | | | AI500659, BE139128, AL120736, AW023590, |
| | | | | AW302988, AI624604, AI345735, BF904244, |
| | | | | AI612885, BG113299, AI784252, AI818206, |
| | | | | BF792469, AI634224, BG163618, AW059837, |
| | | | | AI475394, BG260037, AL036980, AI554245, |
| | | | | AI597750, AI621209, AI702433, AW149227, |
| | | | | AI497733, AW999049, AV757865, AI571133, |
| | | | | AI886753, BF793244, BG257535, BG165051, |
| | | | | BG112879, BF814335, AL134830, BE894455, |
| | | | | AI783504, BF924882, AI869367, BF971016, |
| | | | | AI648663, BF726198, BG110517, BF812933, |
| | | | | AL036403, AW072930, AL120853, AW238730, |
| | | | | BF792961, AI590120, BF038131, BG180996, |
| | | | | AI889133, AL040243, BE964876, AA572758, |
| | | | | BE965192, AI499285, BG114104, AI269862, |
| | | | | BG179993, BE909398, BE018711, AI636445, |
| | | | | AI612759, AL045266, AK024538, I48979, I48978, |
| | | | | Y11587, A08916, AL117583, AF090896, |
| | | | | AL050277, AK000652, I89947, AL359596, |
| | | | | AF078844, AL117585, A08913, U42766, A08910, |
| | | | | AF119899, AF130075, AL133016, I89931, |
| | | | | AK026592, AR087170, AK026741, AB048954, |
| | | | | AK026647, AL050393, AF116602, AK000618, |
| | | | | AL049452, AB047904, AF113677, AK026959, |
| | | | | AF061943, AL137557, AL110221, AL137271, |
| | | | | AL133557, AK025772, U00763, AB052191, |
| | | | | Y16645, AL049430, AF113013, AF116631, |
| | | | | AK025491, AF111847, S68736, AB051158, |
| | | | | AF090943, AK025967, AF218014, AL133075, |
| | | | | AB049758, L31396, AL050108, AK026542, |
| | | | | L31397, AF113690, AF116639, AL110196, |
| | | | | AB052200, AL442082, AF146568, AF079765, |
| | | | | AK024524, AF091084, AR011880, AF017437, |
| | | | | AB048953, AF111851, A08909, AL137538, |
| | | | | AK027164, AF158248, X63574, AK025958, |
| | | | | AL390167, AF116649, AK025524, AF113676, |
| | | | | AB019565, AL049464, AK000445, AL133080, |
| | | | | AF113691, AF207829, AK026532, AK000718, |
| | | | | AX006092, AF116644, AL137550, AK027096, |
| | | | | AF130066, AK026583, AF242189, AF104032, |
| | | | | AL080124, AL359615, AL110225, AF314091, |
| | | | | AX019230, AF113019, AL162083, X82434, |
| | | | | A93016, AL133640, AL049314, AF130105, |
| | | | | AJ238278, AF017152, AL359601, E07108, |
| | | | | AL050116, AL122093, AF118094, AB048964, |
| | | | | Y11254, AL137459, AL117460, AR079032, |
| | | | | AF125948, AX026824, AX026823, A58524, |
| | | | | A58523, AF118064, AX046603, AF118070, |
| | | | | AL122050, S78214, AF113699, AF130059, |
| | | | | AJ242859, AR059958, AL133560, AL050146, |
| | | | | AL442072, AL157431, AL133093, AF119875, |
| | | | | AL359618, AF119878, AB047615, AK000137, |
| | | | | AF177336, AF116682, AK025084, X84990, |
| | | | | AF116646, AK026927, AF090901, AF130104, |
| | | | | AL050138, AL133606, AX019229, AF113694, |
| | | | | AL122123, AK027113, Z82022, AF090934, |
| | | | | AK000647, AK026045, AF119871, E02349, |
| | | | | AF183393, AK025092, AL117457, AL050149, |
| | | | | AF177401, AL080137, AL137527, AL133565, |
| | | | | AF106862, AF116691, AL359941, AF116688, |
| | | | | E03348, AF113689, A65341, AJ000937, |
| | | | | AL049382, AF130092, AK026865, AL080060, |
| | | | | AL389982, X96540, AK026855, AK026353, |
| | | | | AB041801, AF219137, AF090900, AF090903, |
| | | | | AF125949, AL117394, AL122121, AL389978, |
| | | | | AK026744, AF119909, AF225424, AK026784, |
| | | | | AL162006, AF130099, AK026452, AL117435, |
| | | | | I03321, AL050024, AK026534, AL049466, |
| | | | | AF130110, AF097996, X70685, AK026608, |
| | | | | AF130082, AL137463, AL353940, AK026526, |
| | | | | AK026504, A77033, A77035, AK025339, |
| | | | | AK025414, AK000083, AK027204, AF138861, |
| | | | | AK000323, AK026629, AK026086, AK000432, |
| | | | | AK026947, AL122098, U91329, AK000614, |
| | | | | X72889, E07361, AF260566, AL049938, |
| | | | | AL080127, AL096744, AL137648, AF130077, |
| | | | | A03736, AL133113, AK027116, AK025391, |
| | | | | AK025906, U80742, U35846, AK026533, |
| | | | | AL359583, and AF116654. |
| 5 | HSCPC08 | 98 | 1213061 | AW027686, AI333632, AI828510, AA699811, |
| | | | | AI571877, AI056812, AI684189, AI684527, |
| | | | | AI033940, AI090421, AI752451, AA953377, and |
| | | | | ALI57674. |
| 6 | HSCPT22 | 16 | 1243895 | AI807908, AI214900, AV657190, AA018863, |
| | | | | F31353, AA885943, AA725810, AI349772, |
| | | | | AA018896, BE048071, AI687376, BE047863, |
| | | | | AL047042, BE785905, BF343172, AV655645, |
| | | | | AI433976, BF968493, AW071349, BE048163, |
| | | | | BG179993, AL515041, AI868831, AL121270, |
| | | | | AL513907, AI608667, AI436456, AI567351, |
| | | | | AW827203, BG036846, BG058208, AL135661, |
| | | | | BE964700, AW117882, AI433157, AI690751, |
| | | | | AI349645, AI500077, BG179633, AI702406, |
| | | | | BF724691, AL513911, AW268253, BF883916, |
| | | | | AI064830, BG260037, BG168696, AW303152, |
| | | | | BF795712, AI815383, AL513597, BF971016, |
| | | | | AV712838, AL513553, AL036146, BE964812, |
| | | | | BF793644, BE048026, BF054789, AV682249, |
| | | | | AL047763, AL036396, AL046849, AL045500, |
| | | | | BG252929, BE048179, BF726421, AL513803, |
| | | | | BE877769, AI687728, BG108147, AI679724, |
| | | | | AL514919, BF813978, AV711509, AL119049, |
| | | | | BE965556, BF727212, BF792099, AI538716, |
| | | | | BF970731, BE964633, AL119791, BE543089, |
| | | | | AI568870, AV682266, AV755613, AW827211, |
| | | | | BF812933, BG250190, BE018711, AI349004, |
| | | | | AW162071, AW999049, AV682809, AV717179, |
| | | | | AL036802, AL121365, AL514627, AI349933, |
| | | | | AI499393, AW089572, AI873731, AI500553, |
| | | | | AV726951, AV681618, AV706520, AV758668, |
| | | | | BE048065, AV757455, AV710479, AI440426, |
| | | | | BF726297, BF037097, BG114104, BG257535, |
| | | | | BE047859, AL513693, AV755581, BG180996, |
| | | | | AV756122, BF970162, AI340582, AI863014, |
| | | | | AL036980, AL120854, AI349256, AL515173, |
| | | | | BE887488, AI469532, AV681857, BF673434, |
| | | | | BG178809, AV757797, AV762488, AI312152, |
| | | | | AL515047, AI580190, AV757943, AI349937, |
| | | | | AL514803, AV727776, AI673256, AV708119, |
| | | | | AV733819, AV757737, AI934036, AV755290, |
| | | | | AV682772, BG104782, AV704928, BF981774, |
| | | | | AV681951, BF970446, AV681548, BF342709, |
| | | | | BG033403, AV729890, AV723772, AV723953, |
| | | | | AV755614, BG109270, BE881155, AV682441, |
| | | | | BE048081, AL040243, AI818683, BE048135, |
| | | | | AV758179, AI343112, AV682521, AV681668, |
| | | | | AL513631, AI920968, BG151247, AV758806, |
| | | | | BG105099, BG110283, AI687415, AV682289, |
| | | | | AW074993, AA640779, BF107577, AL050393, |
| | | | | I48979, Y11587, AF078844, S78214, AF116691, |
| | | | | AF130105, AF116644, AF125949, AF130082, |
| | | | | AF118070, AF113013, AL157431, AF090943, |
| | | | | AF090900, AF090934, AF116631, AL133640, |
| | | | | AF090901, AF116639, AF130104, AF116602, |
| | | | | AL049452, AX046603, AJ242859, AF116646, |
| | | | | AF113691, AL133016, AF130059, AF138861, |
| | | | | AL389978, L31396, AL442072, AL442082, |
| | | | | L31397, AF104032, AF118064, AB048953, |
| | | | | AF130075, AR079032, A93016, AL117460, |
| | | | | AL050146, AF090903, AL117457, AK026608, |
| | | | | AL133606, AL110196, AL080060, AK000212, |
| | | | | AL049938, AL110221, AL390167, AF113694, |
| | | | | AF116688, AF218014, AL359601, AF119878, |
| | | | | I89947, AF113676, AL137527, AB049758, |
| | | | | A08916, AF130092, AF113690, AF113689, |
| | | | | AL359596, S68736, AB041801, AB047615, |
| | | | | AR059958, AF111847, AL050149, I89931, |
| | | | | AK026865, AK026741, AX019230, AL050116, |
| | | | | AB048964, AL050108, AF106862, AF090896, |
| | | | | AX019229, U42766, X84990, AL133075, A08913, |
| | | | | AL122050, AL162083, AF113677, AL049466, |
| | | | | AK025339, AL049314, AK026045, AK025958, |
| | | | | AL162006, AK025084, AL122093, AF119875, |
| | | | | AL096744, AB019565, AF017152, AF219137, |
| | | | | AF113019, AL050277, AR011880, Y16645, |
| | | | | AL133557, AL080137, AL389982, AL080124, |
| | | | | X63574, AF119899, AF133093, AK026855, |
| | | | | AL137283, AF116649, U91329, AF113699, |
| | | | | I48978, E03348, AL133080, AX006092, |
| | | | | AL133565, AL137557, Y11254, AF111851, |
| | | | | AK026744, AL137459, AF158248, AF091084, |
| | | | | AL049430, AL122121, AK000618, AF097996, |
| | | | | AJ000937, AK026533, AF130099, AF146568, |
| | | | | E07361, AL117394, AK026784, AK026542, |
| | | | | AK000137, AL050138, AF207829, AL122123, |
| | | | | AL359618, AF314091, AK025772, AK027096, |
| | | | | AF125948, AF119871, AF017437, AK026647, |
| | | | | AF271350, AL359941, AL110225, AK000614, |
| | | | | AB048954, AF079765, X82434, AL049382, |
| | | | | AK025092, AB052191, AF119909, AK026452, |
| | | | | AF177401, AB051158, AK026583, AK026927, |
| | | | | AL137550, AK000083, AB048974, AK000445, |
| | | | | U00763, AF242189, AL353940, AR087170, |
| | | | | AL133258, AL050024, AK024538, AK000652, |
| | | | | AL049300, AK025491, AL117585, AL133560, |
| | | | | E07108, AL117583, A65341, AK026592, |
| | | | | AK026086, E02349, AK026480, AK026532, |
| | | | | AJ238278, S61953, AK026504, AL117435, |
| | | | | AL359615, AK026353, E05822, AF225424, |
| | | | | AK025967, AK026534, AL049464, AF067728, |
| | | | | AX042059, AF177336, AC002467, X70685, |
| | | | | AK027113, A08910, AK026959, AK027164, |
| | | | | AB052200, AC006371, AB047904, AF130087, |
| | | | | AF130077, AF091512, A08912, AK000432, |
| | | | | AB049892, AF130110, AK025391, AF116682, |
| | | | | AK026528, AK025414, AL353802, AF130066, |
| | | | | AK027204, AL157482, AK000323, AX026824, |
| | | | | AX026823, A58524, A58523, AC007390, I33392, |
| | | | | AF061943, AF183393, AL137463, A03736, |
| | | | | AC004690, and AK026526. |
| 6 | HSCPT22 | 99 | 1209266 | AA885943, AI807908, AI214900, BF813978, |
| | | | | AV657190, AA018863, F31353, AI810745, |
| | | | | AA725810, AA018896, AW450272, and H91431. |
| 7 | HTLED86 | 17 | 1253125 | BE795173, BE396202, AI660332, AA203212, |
| | | | | AA449065, AW328367, BF341164, AI392657, |
| | | | | AV654528, AA813194, BF732391, BF115878, |
| | | | | AI151232, AI291374, AI858223, BF515283, |
| | | | | AI560253, BE857199, AW449943, AW083349, |
| | | | | BF732290, BF513268, AI191781, AW166236, |
| | | | | AA968918, AW006233, N27280, AA479498, |
| | | | | AA628224, AA778607, AW104829, BF970270, |
| | | | | AW182126, AI245640, AI269136, AI247510, |
| | | | | AI738471, BF062346, AA402172, AI991306, |
| | | | | AA411981, R70251, AW405094, AA883484, |
| | | | | AW881569, T19278, BF306943, AI215021, |
| | | | | AA018465, AA832117, BG027648, BF739796, |
| | | | | AI825124, T95699, AI637616, AW001378, |
| | | | | H01229, AA479495, R72487, AI767110, |
| | | | | BF514171, AW889978, AA831289, AA922164, |
| | | | | AA286916, BG001513, AI096849, AA962361, |
| | | | | AA809942, R38228, C02128, AA831675, |
| | | | | AI699011, AI308035, AW268060, AV743631, |
| | | | | BG166999, AW302973, H42825, AI802826, |
| | | | | AI612068, AI309420, AI539153, AI318254, |
| | | | | AI570966, AI696969, AW409775, AI539632, |
| | | | | AI365256, AI677797, AI698401, AI345787, |
| | | | | BG165051, AI611418, AI360560, BE965724, |
| | | | | AW088899, AI280661, AI537617, AI612759, |
| | | | | BF726001, BE621256, AW102900, BF342341, |
| | | | | AI784028, AW193203, AI680498, BE962865, |
| | | | | AI366985, AW265004, AI468872, AV706775, |
| | | | | AI950688, AI610667, AI348880, AI802240, |
| | | | | AA603709, AW082594, AL120736, AI349646, |
| | | | | AA493923, BE885353, AI590702, AI866082, |
| | | | | AI633477, AI752007, AI866111, AW085639, |
| | | | | BF814449, AI251221, AI472536, AI358042, |
| | | | | AW827106, AI434242, AI349967, AI345615, |
| | | | | BG260144, BE048087, BF921103, AI919345, |
| | | | | AW858254, BF815196, BF915208, AW858243, |
| | | | | AA974506, AI251205, AI829377, BF575118, |
| | | | | AI339435, AI648502, AI445010, AW302073, |
| | | | | AW262565, BF986689, AI952064, AI623363, |
| | | | | AA999906, AI285586, BF924884, AI567637, |
| | | | | AI697324, AI679550, BF317483, AI470293, |
| | | | | AI499463, AI919593, AI221035, AI312246, |
| | | | | AI922577, AI874151, AA830821, AI446092, |
| | | | | AI569616, AI669639, AV756046, AI500039, |
| | | | | AW085786, H89138, AI620093, AI597805, |
| | | | | AW082600, AI345746, AI471361, N80094, |
| | | | | BE543089, AI952862, AI687065, BE538466, |
| | | | | AW500379, BE964645, AW162194, AI682891, |
| | | | | BG250109, AW151847, BF854113, BE048179, |
| | | | | AW089006, BF338027, AI678762, BF904180, |
| | | | | AW089436, AI963062, AI805688, AW004886, |
| | | | | AI611743, BE965169, BF726160, AI371886, |
| | | | | AW089258, AW168503, W81248, BF868927, |
| | | | | AI872148, AL038154, AI241792, AW151729, |
| | | | | AW411412, AI816292, BE172499, AW302432, |
| | | | | AW301410, BF726183, AW189933, AA455772, |
| | | | | AA807088, BE263582, AW075645, AI800411, |
| | | | | AI249946, AW029401, AI476077, BF725518, |
| | | | | BE965415, AW072485, BE963035, BF814541, |
| | | | | AI446124, BG027628, AW130863, BF725863, |
| | | | | AI696378, BF915537, BE061389, BE905408, |
| | | | | AW834355, AJ250392, AL389978, AK026865, |
| | | | | AL137526, U42031, AX014095, AL137557, |
| | | | | AL442082, AL133014, AL162062, AF113689, |
| | | | | AL137547, AF217991, AL389935, AF158248, |
| | | | | AL122098, A18777, AL122111, U80742, |
| | | | | AF132676, E06743, AF061836, AF242525, |
| | | | | AL110171, AL080158, AF017152, S68736, |
| | | | | AF271350, AK024601, X52128, AL117432, |
| | | | | I48978, Y08769, A08916, AX047644, AK026592, |
| | | | | I89947, AF012536, AF113699, AL359600, |
| | | | | AK025541, A08913, AL080137, AL137527, |
| | | | | AF207829, AK026533, I89931, X57961, |
| | | | | AL080127, U87620, AF061795, AF151685, |
| | | | | AF111847, AX027129, S77771, A08912, E02221, |
| | | | | A08910, AL122123, I89934, AK000652, |
| | | | | AR087170, A08909, AK027081, AB047248, |
| | | | | AF116644, AR038854, AK026504, AK026583, |
| | | | | A08908, AK026164, AL137300, AK024594, |
| | | | | AL049460, AF028823, AF118070, AK026947, |
| | | | | AK025491, AB007812, U96683, AB050431, |
| | | | | AL157431, AL137521, S76508, AF036941, |
| | | | | AF205861, AF094850, AK000618, AL133645, |
| | | | | AK026651, AR070212, AL110197, I17544, |
| | | | | AF116649, AJ010277, AF208850, AF081197, |
| | | | | AF081195, AL353802, E01812, AB047887, |
| | | | | X80340, AL049314, AF155221, AK025798, |
| | | | | AF119856, X53587, AL137658, AK025383, |
| | | | | AL390167, AF119337, AL137556, U67958, |
| | | | | AK000432, AK026626, D83989, AR059958, |
| | | | | AF119857, AF130068, AL389951, AK026628, |
| | | | | AF130100, AK025632, AL117629, AK025772, |
| | | | | AL353957, AL110222, AJ012755, AK000450, |
| | | | | AF113694, AF118094, AR038969, AK025391, |
| | | | | AF067420, AF118090, AL080154, AK027161, |
| | | | | AL133081, AB047941, AB052191, AF119909, |
| | | | | AK026613, AF159615, AK000647, AF130077, |
| | | | | AB047631, AL137705, S79832, AB029065, |
| | | | | AF022363, AF000145, AK026608, AF104032, |
| | | | | AK024570, AK000718, AB051158, AB019565, |
| | | | | AF067790, AL133104, AK026894, A65340, |
| | | | | AL162008, X79812, Y11587, AF215669, |
| | | | | AF065135, AF119878, AB041801, X62580, |
| | | | | AF162270, AF166267, AK026522, AK025209, |
| | | | | AL389957, AL117585, AB047869, AK000250, |
| | | | | S69510, AL133016, AK024538, I66342, |
| | | | | AF260566, AK025484, U49434, AF261883, |
| | | | | AK027160, AK025465, AL137292, I89944, |
| | | | | E04233, AB047615, AF225424, AK000636, |
| | | | | AK026885, M86826, AL137273, X63574, |
| | | | | AF266204, AK026532, X81464, AC023880, |
| | | | | AL117648, A08907, AB016226, AX019230, |
| | | | | AK025958, AK025375, AL110221, E08631, |
| | | | | AF188698, U00686, AF040751, AL353940, |
| | | | | AK026551, AK024546, M92439, AB049848, |
| | | | | AL080086, X72387, AF111851, AF079763, |
| | | | | AF130092, AK027204, AF113222, AK026746, |
| | | | | AB044390, AB047904, AL080148, AL137665, |
| | | | | AL080060, AF119883, AL137429, AF003737, |
| | | | | E03348, AF130066, AB048953, E02253, |
| | | | | AK026057, X00861, E03349, AR000496, |
| | | | | AK000137, U39656, AB048919, AL050172, and |
| | | | | L30117. |
| 7 | HTLED86 | 100 | 1222077 | BF732391, BF115878, AW083349, BE857199, |
| | | | | BE396202, AA479495, AW328367, AA479498, |
| | | | | AI858223, AI151232, AA778607, AW405094, |
| | | | | BF514171, AW166236, AI291374, AI567943, |
| | | | | AI560253, BE795173, AI096849, BF732290, |
| | | | | AW449943, BF515283, AA628224, AI191781, |
| | | | | N27280, AW006233, AA968918, AA761741, |
| | | | | R70251, AW182126, AI245640, AI269136, |
| | | | | AI738471, H00846, T19278, AA883484, |
| | | | | AA286916, BF529836, AI660332, AW104829, |
| | | | | AA018465, R38227, BF739796, BE905019, |
| | | | | AW001378, H01229, R70296, AA831675, |
| | | | | AI767110, AA832117, AW889978, AA831289, |
| | | | | AA922164, BF970270, AA402172, AA962361, |
| | | | | AA203212, AA809942, AA876230, BE882323, |
| | | | | AW881569, R38228, BG027648, T95699, |
| | | | | BF341164, BF986689, R72487, and AJ250392. |
| 7 | HTLED86 | 101 | 1221659 | BE795173, AI660332, AW104829, BE396202, |
| | | | | AA203212, AA402172, BF341164, AW328367, |
| | | | | AW881569, T19278, BF970270, AA832117, |
| | | | | T95699, R72487, AI858223, AI560253, AI151232, |
| | | | | AI291374, AI245640, AI269136, AI738471, |
| | | | | BF732290, AW449943, BF515283, AI767110, |
| | | | | BF115878, AW083349, BF732391, BE857199, |
| | | | | BF739796, AA968918, AW006233, AW166236, |
| | | | | AW182126, AI191781, AW889978, AW001378, |
| | | | | BG027648, AA831289, H01229, AA018465, |
| | | | | N27280, AA628224, AA479498, AA922164, |
| | | | | BF306943, AA778607, AW405094, AA962361, |
| | | | | R70251, BG001513, AA809942, AV654528, |
| | | | | AA883484, R38228, AA449065, AI392657, |
| | | | | BF986689, BF514171, and AJ250392. |
| 8 | HTPKP89 | 18 | 1263310 | AI681538, AA399973, BE326518, BE504079, |
| | | | | AA573265, AA401309, AI379315, AI215506, |
| | | | | AW471197, AI377132, AI681742, AI332991, |
| | | | | AW269403, AI377465, AI685315, AA456746, |
| | | | | AI263428, AI374952, N93369, N23006, N32714, |
| | | | | AA884641, AI218150, AA226426, W24957, |
| | | | | AI140445, N95585, AA773714, AA253264, |
| | | | | T86889, H17820, AW269001, T86888, AA226563, |
| | | | | AI033243, AA041235, AA358475, H17819, |
| | | | | R16622, R16564, W25386, AA883664, AA773710, |
| | | | | R16637, AA040797, BF509086, AW895164, |
| | | | | AI927610, N89206, AI208762, AK027056, and |
| | | | | AK026797. |
| 8 | HTPKP89 | 102 | 1213121 | AA399973, H17819, AW895164, N89206, |
| | | | | AI681742, BE326518, BE504079, AK027056, and |
| | | | | AK026797. |
| 9 | HSRFP52, HJBCU75, | 19 | 1254537 | AA789332, BE669814, AW469963, AI925535, |
| | HSRGW16 | | | AI925543, AV728348, BE080915, BF732842, |
| | | | | BE670545, AI685010, AI690167, AA570056, |
| | | | | AA470465, AW969303, AW770920, AA311661, |
| | | | | AI634463, T95424, AI283530, AW003925, |
| | | | | AW080646, T95333, BG179881, BE617765, |
| | | | | AI468303, BF310921, AA312696, AA347877, |
| | | | | AA336623, AW268987, AW962841, AA356443, |
| | | | | BF690832, AA311608, AA682679, and |
| | | | | BE962309. |
| 9 | HSRFP52, HJBCU75, | 103 | 745408 | AA789332, AW469963, AI925535, BE669814, |
| | HSRGW16 | | | AI925543, AV728348, BF732842, BE080915, |
| | | | | BE670545, AI685010, AI690167, AA570056, |
| | | | | AA470465, AW969303, AW770920, AI634463, |
| | | | | T95424, AW003925, T95333, AW080646, |
| | | | | BG179881, BF310921, BE617765, AI468303, |
| | | | | AA312696, AW268987, AW962841, AA356443, |
| | | | | BF690832, AA311608, AA682679, and |
| | | | | BE962309. |
| 9 | HSRFP52, HJBCU75, | 104 | 1182209 | AA789332, AW469963, AI925535, AI925543, |
| | HSRGW16 | | | BF732842, AA312696, BE670545, AI685010, |
| | | | | AI690167, AA570056, AW962841, AA470465, |
| | | | | AA311661, AW969303, AW770920, AI283530, |
| | | | | AI634463, T95424, AW003925, T95333, |
| | | | | AW080646, BE617765, AI468303, AA311608, |
| | | | | AA347877, AA336623, AW268987, BE669814, |
| | | | | AA356443, BF690832, AW753521, AA682679, |
| | | | | and BE962309. |
| 10 | HDHEA83 | 105 | 1213580 | AW971745, AW861944, AW804686, AW392670, |
| | | | | AL119355, BE695785, AW604723, BF868687, |
| | | | | AW858526, U46351, AW858525, AW877209, |
| | | | | AL119319, U46349, AL119324, AL119457, |
| | | | | AW577135, BE705903, BE705906, AW372827, |
| | | | | AL119483, Z99396, AW384394, AW861889, |
| | | | | AW858455, AW363220, AL119341, AL119497, |
| | | | | AL119484, AL119363, AL119391, BF868697, |
| | | | | U46350, U46347, AL119443, AL119418, U46341, |
| | | | | AL119444, AL119399, AW604726, AL119439, |
| | | | | BF868684, BE705905, AL119522, AL119396, |
| | | | | U46346, AL119335, AL134902, AL042984, |
| | | | | AL037205, AL119401, AL134536, AL134538, |
| | | | | AL119464, AL134525, BE705904, AL042450, |
| | | | | AL119496, AW861954, AL042433, AI142131, |
| | | | | U46345, AL043033, AL042542, AL042614, |
| | | | | AL043029, AL042544, AL043008, AL043011, |
| | | | | AL043019, AL042551, AL039912, AL042965, |
| | | | | AL042975, AL043003, AB026436, AR080280, |
| | | | | AR054110, AR060234, AX046357, A81671, |
| | | | | AJ251859, AX030435, AR066494, AJ279014, and |
| | | | | AR069079. |
| 10 | HDHEA83 | 106 | 1217946 | AI816163, AI928507, BE778289, AW157769, |
| | | | | AA115293, AW162106, AA059445, AW665627, |
| | | | | AW139159, BG252118, AI192344, AI885801, |
| | | | | AW665634, BF002221, AA865462, AI581151, |
| | | | | AI674451, AW953263, AA190572, AI364132, |
| | | | | BF059737, AI740781, AW157220, AI743998, |
| | | | | BF739901, AI337924, AA993075, AI564803, |
| | | | | AI400087, AW139120, AW340685, AW081568, |
| | | | | BE858480, AI686640, AI271370, AI917170, |
| | | | | AI379866, W07097, AA609367, AI827282, |
| | | | | AI130691, AI022774, AI148957, BF224008, |
| | | | | AA236262, AI494517, AA548108, AA045201, |
| | | | | AI089708, AI123670, AI392976, AA748177, |
| | | | | AA479158, W30860, AA977280, AA464601, |
| | | | | BF434738, AI865643, R11725, AV694720, |
| | | | | AA758679, AI910788, AA608963, AW770704, |
| | | | | N68177, AI370751, AI634775, N79357, H64063, |
| | | | | AI143918, N70018, N70101, D56114, AW292793, |
| | | | | AI130031, BG054534, W76453, AI017785, |
| | | | | AI1332514, N89589, AI953179, T08704, W25482, |
| | | | | BG112230, AA769968, AI361520, AW052056, |
| | | | | AA253390, N93606, AA576801, AI419339, |
| | | | | AI582942, AI141956, W00904, AA917660, |
| | | | | AW952656, BF922214, BF922329, AI554648, |
| | | | | BF922196, W44446, BF922198, W72167, |
| | | | | AI926095, AI038178, BF922336, H23389, H17572, |
| | | | | BE621053, N80636, AI024529, AW515684, |
| | | | | AA253494, AA442642, AW160489, BF732739, |
| | | | | AA490370, AI338291, AA775555, AI569707, |
| | | | | AI240331, H10232, W44333, AA193686, |
| | | | | AI873106, AI224568, AI768727, BF922191, |
| | | | | AA147429, H80788, AA580142, H29283, H49657, |
| | | | | R12178, BE829596, N94570, R64411, BE671020, |
| | | | | AI743751, R11308, AI631146, H20219, R15108, |
| | | | | AW611951, AI809025, AA064633, H21486, |
| | | | | AA664481, T33459, N72328, T93973, AV722621, |
| | | | | AA548109, R11692, AI123156, AA779540, |
| | | | | H29372, H10188, R17698, AW028801, AA203687, |
| | | | | AV684911, H58194, BE829585, R25302, |
| | | | | BF194784, H64012, AI199446, AI970230, |
| | | | | BF203288, AV688218, AI249347, BF922339, |
| | | | | AV688252, H49578, AA621000, BF436352, |
| | | | | R10906, AA479159, AV698634, BE816514, |
| | | | | R52445, Z38875, AI369842, AW086460, H23278, |
| | | | | R63805, N77929, BF476560, AI302454, H58195, |
| | | | | T93297, AI470857, R61486, AA432390, |
| | | | | AW052072, AW135183, AI338947, AI652083, |
| | | | | R11309, Z42721, W07362, AI654228, H40308, |
| | | | | R17671, H97145, N62391, AI951234, AW163809, |
| | | | | BF063160, R46654, H75492, H17466, W00933, |
| | | | | BE183035, AA350612, AW087484, AA247266, |
| | | | | AA234042, Z41856, AA058797, AA928338, |
| | | | | BF940235, AA490270, N48947, BG012834, |
| | | | | H94721, AW590548, AW236897, AW073716, |
| | | | | AW450767, N52829, AI867216, BE764360, |
| | | | | AI242270, BE764450, BF909053, R98344, |
| | | | | AF065389, AF053455, AF121344, AI474685, and |
| | | | | AI982788. |
| 11 | HFXBR92 | 21 | 1243870 | W01583, AA111937, BE839158, AA705807, |
| | | | | BE839119, AL044762, Z30116, BE839157, |
| | | | | BE838977, N55865, BF725844, BF827578, |
| | | | | AW674277, BF827572, AW963444, AA456924, |
| | | | | H29914, BF821009, AW161016, H38769, |
| | | | | AA714011, AI279417, BG010084, BF792474, |
| | | | | AU140208, AL041240, AV756491, BF725178, |
| | | | | AI866580, BF821897, BF922071, AW023111, |
| | | | | AA487226, AI569981, AA284247, F35684, |
| | | | | AW674258, AI560085, AW275432, AW897697, |
| | | | | AA714110, AA582746, AI187148, AI984168, |
| | | | | AI282623, AV738383, BG222875, AI433104, |
| | | | | AA171892, AW516255, AI799607, AV760091, |
| | | | | BF198067, BG009504, AI362442, AB014513, |
| | | | | AJ133768, AJ133767, AL049589, AF196779, |
| | | | | AC006449, AC012467, AL009183, AC008392, |
| | | | | AL137798, AC004797, AC007030, AC004980, |
| | | | | AC009600, AP000310, AC018514, AC009247, |
| | | | | AC011540, AC025588, AL117354, AP000116, |
| | | | | AL109743, AL049636, AL117348, AC002350, |
| | | | | AL157938, AL031848, AC003108, AC005098, |
| | | | | AC005529, AC007637, AC004966, AL133387, |
| | | | | AP000022, Z98044, AC005274, U63630, |
| | | | | AC002347, AC018663, AP001426, AC003982, |
| | | | | AC009244, AL136228, AC005837, AL050349, |
| | | | | AL109614, AC007488, AF053356, AC002470, |
| | | | | AC010422, AC004150, AC007365, U52111, |
| | | | | AC002091, AB045146, AL109976, AC020916, |
| | | | | AC024584, AC005846, AC006026, AL079335, |
| | | | | AL133355, AC022436, AL049776, AC005052, |
| | | | | AC006509, AC008753, AC002425, AC007066, |
| | | | | AL008630, AL035400, AL160231, AC007686, |
| | | | | AL022313, AL158198, AC007400, AL356299, |
| | | | | AC005776, AL022163, AC005236, AL121886, |
| | | | | AC006978, AL122002, U89337, AC007850, |
| | | | | AP001731, AC004222, U95740, AC006966, |
| | | | | AF129756, AC004166, AC004882, AC004832, |
| | | | | AC007685, AC004694, AC005261, AC010458, |
| | | | | AC011442, U80017, AL353804, AC003101, |
| | | | | AC013447, AC009003, AC005071, AL133230, |
| | | | | Z93024, AP000345, AC006330, AL135744, |
| | | | | AB001523, AC008806, AC004983, AL049569, |
| | | | | AC004383, AC009508, AF196969, AC008764, |
| | | | | AC005189, AP001717, AL162831, AL121601, |
| | | | | AL359382, AL138733, AC007201, AC007845, |
| | | | | AL122023, AC083871, AC007226, AL008735, |
| | | | | AL121751, AC005730, Z93015, AC007782, |
| | | | | AL023883, AC007388, AC004846, Z93023, |
| | | | | AC004965, AC007993, AC005551, AL136362, |
| | | | | AC006450, AC008569, AF168787, AF030453, |
| | | | | AL078461, AL353807, AC007774, AP001714, |
| | | | | AC009086, AC005067, AC005624, AL121920, |
| | | | | U61981, AP001628, Z84469, AC011445, |
| | | | | AC022493, AL136137, Z82245, AC009060, |
| | | | | AC007688, AL049839, AC006538, AL022302, |
| | | | | AC004805, AL136418, AL035405, AC006111, |
| | | | | AF124731, AC005000, AC005089, Z97832, |
| | | | | AC005844, AC002511, AC005081, AC009307, |
| | | | | AL135960, AP001711, AJ131016, AL136295, |
| | | | | AC002404, AL391259, AL035455, AC005482, |
| | | | | AC011533, AC006241, AC004089, AL021707, |
| | | | | AC004813, AC000025, AC006211, AC005871, |
| | | | | AC008537, AL121905, AC016655, AC011465, |
| | | | | AC004257, AL354720, AL160313, AC002485, |
| | | | | AC005527, AL049832, AP000103, AC004802, |
| | | | | AC020552, AC012309, AC006349, AC005562, |
| | | | | AL136304, AC008745, AL445483, Z84480, |
| | | | | AL121753, AC007731, AL157838, AL356057, |
| | | | | AC007221, AL031984, AL133260, AC007207, |
| | | | | AL049643, AC005500, U78027, AC008812, |
| | | | | AC005277, AC006084, AL022320, AC005088, |
| | | | | AL034405, AC006581, AL049547, AL139109, |
| | | | | AL158040, AC009032, AC005696, AC020550, |
| | | | | and AC011480. |
| 11 | HFXBR92 | 108 | 1208739 | BF725844, AW674277, AW963444, BF821009, |
| | | | | AA456924, H29914, AW161016, BF792474, |
| | | | | AA714011, BG010084, AI279417, AI866580, |
| | | | | BF821897, AU140208, AL041240, AV756491, |
| | | | | BF725178, BF922071, AW023111, AA487226, |
| | | | | AI560085, AI569981, AA284247, AI984168, |
| | | | | AI433104, H38769, F35684, F30158, AW674258, |
| | | | | AW897697, AW275432, AA714110, AA582746, |
| | | | | AI187148, AI282623, AV738383, BG222875, |
| | | | | AV760091, AI799607, AI690497, AA171892, |
| | | | | AW516255, BE138484, BF198067, AP000116, |
| | | | | AL009183, AL117354, AC003108, AC018738, |
| | | | | AC005919, AL135818, AC008044, AC004805, |
| | | | | AP001714, AC002565, AL117348, AC008155, |
| | | | | AC003982, AC005519, AC002543, AF190464, |
| | | | | AP001717, AC009365, AC008543, AC006449, |
| | | | | AC008760, AC005098, AC009086, AC010605, |
| | | | | AP001709, AC004867, AL136223, AC005746, |
| | | | | AC005080, AL163247, AC008736, AL109743, |
| | | | | AC007030, AC004383, AL135783, AC004166, |
| | | | | AL049589, AC005261, AF196779, AL137129, |
| | | | | AC008403, AC007637, AC002477, AC009247, |
| | | | | AC009600, AC011489, AP000310, AP001748, |
| | | | | AB003151, AC018514, AC025588, AC011540, |
| | | | | AC012467, AC008392, AL137798, AL161670, |
| | | | | AC020552, AC007597, AC002045, AC005280, |
| | | | | AC005920, AC004966, AC005237, AC009060, |
| | | | | U89337, AC002485, AL109935, AL078461, |
| | | | | AC006509, AL136305, AC002350, AL031848, |
| | | | | AC007225, AC004797, AL162831, AC005529, |
| | | | | AC007066, AL133387, AC003101, AC010271, |
| | | | | AC004965, AL157938, AL008735, AC005274, |
| | | | | AJ295844, AP000022, Z84480, AF196969, |
| | | | | AC004980, AC018663, AL022163, AC005678, |
| | | | | AC008745, AC005189, AC009032, AP001426, |
| | | | | AC020916, AC009244, AC005837, AL121983, |
| | | | | AC006330, AL050349, AL138743, AC008569, |
| | | | | AC005730, AC007850, AC007488, AL135927, |
| | | | | AC007227, AC007365, AC004150, AC002091, |
| | | | | AC016637, AL049776, AC005846, AC024584, |
| | | | | AC005052, AL160231, AL354750, AL049636, |
| | | | | AL079335, AL121751, AC004520, AC004491, |
| | | | | AC007686, AL157372, AL158198, AL021707, |
| | | | | AL022313, AC016655, AC006441, AC013447, |
| | | | | AP001731, AL031594, AP000121, AC005236, |
| | | | | AF129756, AC004222, U95740, AC005089, |
| | | | | AC004882, AL135744, AC004832, AC011465, |
| | | | | AC004526, AL022302, AC009331, AL135960, |
| | | | | AJ131016, AC011442, AC004216, U80017, |
| | | | | AC010458, AC005071, AL122023, Z98044, |
| | | | | AC005971, AC008806, AL137783, U63630, |
| | | | | AL136137, AB001523, AC002347, AC006329, |
| | | | | AC005768, AL353807, AC006487, AC009508, |
| | | | | AC002429, AL121653, AC009003, AC005011, |
| | | | | AC010419, AL390039, AL022721, AC016601, |
| | | | | AC083871, AC006126, AL136228, AL138733, |
| | | | | AC007899, AC010412, AC007782, Z93015, |
| | | | | AL109614, AP000512, AC007201, AC004846, |
| | | | | AC005696, AF168787, U82828, AC007679, |
| | | | | AC002994, AL136362, AF030453, AF053356, |
| | | | | AC011475, AC002470, AC007371, AC010422, |
| | | | | AL133215, AC007541, AC005722, AC005067, |
| | | | | AC005551, AE000658, U52111, AC010463, |
| | | | | AL121601, AC007774, AL121920, AF312915, |
| | | | | AC007358, AC011445, AC022201, AC018507, |
| | | | | U96629, AL035405, AL121886, AB045146, |
| | | | | AL109976, AC022150, AC004089, AC007207, |
| | | | | AC004531, AC005000, AC005074, AL034420, |
| | | | | AL078590, AC006538, AC007308, AP001753, |
| | | | | AC004685, AC006026, AL133355, AL157838, |
| | | | | AL391259, AL121936, U95739, and AC002404. |
| 11 | HFXBR92 | 109 | 1046466 | W01583, AA111937, AL044762, BE839158, |
| | | | | AA705807, BE839119, Z30116, BE839157, |
| | | | | BE838977, N55865, BF827578, BF827572, |
| | | | | AA091640, N89082, AA249409, BE839162, |
| | | | | AA425362, AA248041, AV727824, AV699224, |
| | | | | AB014513, AJ133767, and AJ133768. |
| 12 | HSYIH77 | 22 | 1276392 | AL524088, AL110452, AW749657, BF589432, |
| | | | | AA280081, AW294123, AW149570, AW130349, |
| | | | | AW055009, AI949814, AI142520, AI982810, |
| | | | | AW161528, AA047100, BE855561, AL524089, |
| | | | | AW157022, AA281323, AA101644, AA279077, |
| | | | | AA938948, AW629474, AA485084, AA592999, |
| | | | | AA101643, AA631312, AA775640, AA759272, |
| | | | | AA047237, AI183353, AI374883, AW892064, |
| | | | | AW073343, AA485196, AI081003, AL536073, |
| | | | | BE185537, AA491277, AA482141, AI370489, |
| | | | | AA331847, AI243704, AW613930, AW613943, |
| | | | | AA757371, AI824149, AA897566, AI362091, |
| | | | | AI243938, AA883065, AA745309, AA744016, |
| | | | | AA744211, AB047883, and AK026237. |
| 12 | HSYIH77 | 110 | 1209388 | AL524089, and AL536073. |
| 13 | HTAHS92 | 23 | 1243918 | AW207577, BF092253, AI808825, AI122773, |
| | | | | BF940077, AI360866, AA843394, AW162643, |
| | | | | AW161798, BF055052, BF092246, BE856661, |
| | | | | BG167100, AA465420, AI123189, AI031947, |
| | | | | AI804220, AW975899, AV716838, AI472045, |
| | | | | AA578830, AI740490, AL041924, AI075265, |
| | | | | BF725844, AI873914, AA019973, BE395519, |
| | | | | AI282253, AA013168, AW591276, BE139139, |
| | | | | AI250552, AI223626, AI254770, AI249853, |
| | | | | AI251284, AI251203, AI251034, AI284543, |
| | | | | T74524, AW969743, AW975210, BF092245, |
| | | | | AA515728, AI432298, AI283334, AI224956, |
| | | | | BF805088, AI369580, BF725761, BE042006, |
| | | | | N31708, AI251241, AI309059, BE968744, |
| | | | | AA829036, BF880777, BE138387, AW338021, |
| | | | | AW303098, AA483606, AI984168, AL079734, |
| | | | | BG152773, AI687343, AA570740, AI754105, |
| | | | | AA568204, AW872676, T96036, AI613389, |
| | | | | BF857849, AL041706, AA054085, AI821200, |
| | | | | AI755214, AW576251, AI754567, AI431513, |
| | | | | AV743864, AW500684, BE328286, AV764001, |
| | | | | H29914, AA533054, AW238341, AI634187, |
| | | | | BF821897, AW069227, AV718585, AA485482, |
| | | | | AA572983, AI801649, AI791659, AI864500, |
| | | | | BE139133, AI889579, AW275432, AI744830, |
| | | | | AI801563, AK026704, AC008760, Z97053, |
| | | | | AC020910, AL078475, AC006509, AL163203, |
| | | | | AP001621, AC006116, AC008753, AC018676, |
| | | | | AC022143, AL049540, AC008083, AP001748, |
| | | | | AC008892, AL121936, AC004025, AP001629, |
| | | | | AC011749, AC018644, AP001745, AL163204, |
| | | | | AC002059, AC002091, AC005996, AC000041, |
| | | | | AC009424, AB035185, AC009410, AC007283, |
| | | | | AL024498, AC006033, AC010135, AJ297357, |
| | | | | AF165176, AL163283, AC003695, AF030453, |
| | | | | AC078847, AC006040, AF117829, AF159056, |
| | | | | Z93241, AC022148, AC005088, AP001660, |
| | | | | Z98950, AC018633, AC004617, AC078899, |
| | | | | AC005295, AC002992, AP001743, AL050308, |
| | | | | AC005919, AL031602, AC006539, AP001347, |
| | | | | AB019438, AL355980, AL133163, AC007276, |
| | | | | AP001615, AL139277, AF064863, AC007690, |
| | | | | X96421, AL136501, Z83839, AL355478, |
| | | | | AC011449, AP001630, AC007193, AC004459, |
| | | | | AC009276, AL117337, AB020859, AL356234, |
| | | | | AF205588, AL022332, AL137861, AL139826, |
| | | | | AL355101, AC005229, AC008969, AC007972, |
| | | | | AC003682, AC007793, AK022963, AL031432, |
| | | | | AL133258, AC007284, AL031846, AC004230, |
| | | | | AL035461, AC010143, AC012039, AC006987, |
| | | | | AC005901, AP001050, AP001751, AC008556, |
| | | | | AL049646, AC022150, AC010326, AC004921, |
| | | | | AL121983, AC002477, AC009086, AC008997, |
| | | | | AL031003, AC009301, AC005037, AC007790, |
| | | | | AC004695, AL158832, AC008176, AC008469, |
| | | | | AC006552, Z98749, Z95114, AP001466, |
| | | | | AL162390, AL122023, AF265340, AC011475, |
| | | | | AL133289, AC006530, AP000344, AC000025, |
| | | | | AC006430, AC005871, AC006387, AC012085, |
| | | | | AL139100, AC006206, AC005722, AC009319, |
| | | | | Z81364, AC013410, AC008929, AC002036, |
| | | | | Z95152, AC006487, AC004846, AL021407, |
| | | | | Z82244, AC006449, AL136231, AL133243, |
| | | | | AL355392, AC012384, AC007563, AC003007, |
| | | | | AL356244, AC003043, AC005887, AL135960, |
| | | | | AJ131016, AL355612, AC006381, AP002534, |
| | | | | AC008071, AL133448, AF045555, AL022336, |
| | | | | AL031428, AC007954, AC009179, AC005920, |
| | | | | AP001705, AC011489, AC027644, AC006064, |
| | | | | AL109827, AC005164, AC011495, AC004087, |
| | | | | AL133445, AL049872, AC005696, AL358777, |
| | | | | AC009946, AC005632, AB045363, AC006458, |
| | | | | AC013434, AC009481, AC024947, AC002316, |
| | | | | AC026167, Z98051, AF196969, AC005694, |
| | | | | AL035660, Z98946, AL137073, AF053356, |
| | | | | AL357374, AL138708, AC003684, AB026898, |
| | | | | AC010463, AF196779, AC007384, AC011479, |
| | | | | AC004912, AC025765, U07561, AC004002, |
| | | | | Z69705, AB016897, AL033529, Y10196, |
| | | | | AL159997, AL031847, AC004837, AC010000, |
| | | | | AC011490, AC008569, AF124523, AC006482, |
| | | | | AC007308, AC008687, AC007639, Z97184, |
| | | | | AC008403, AL109825, AJ003147, Z98949, |
| | | | | AF020503, Z84466, AC002470, and AC004593. |
| 13 | HTAHS92 | 111 | 1213187 | AW969743, BF805088, AA483606, AA570740, |
| | | | | AA568204, AW872676, AI613389, AI821200, |
| | | | | AA485482, AL041706, BF725844, BF857849, |
| | | | | BF885741, AW008317, BF821009, AA737158, |
| | | | | AW872575, BF880777, AA021552, AA829036, |
| | | | | AA664126, T49184, AI792304, BF821897, |
| | | | | AC008760, AK026704, AC002036, AL138756, |
| | | | | Z95114, AC005722, AC005514, AL159997, |
| | | | | AC007563, AC005180, Z81364, Z98946, Z95152, |
| | | | | AL162424, AC000025, AC011489, AC006449, |
| | | | | Y10196, AL139100, AC000003, AC006487, |
| | | | | AC011475, AL133448, AL031595, AL031597, |
| | | | | AL049569, Z82244, AL137802, AC007375, |
| | | | | AC012384, AP000555, AC005164, AF196969, |
| | | | | AC003043, AF045555, X74558, AC005288, |
| | | | | AC024947, AC008560, AC008687, AC010463, |
| | | | | AC006064, AC005696, AJ277546, AL109827, |
| | | | | Z98051, AC005529, AC004826, AC008403, |
| | | | | AP001714, AC007541, AC009086, AC010412, |
| | | | | AC011495, Z83856, AC005377, AC005081, |
| | | | | AL162458, AC003957, AL357374, AL033529, |
| | | | | AC005920, AF001549, AC008569, AL049539, |
| | | | | AL031295, AP001718, AC007384, AC011490, |
| | | | | AL133500, AC006285, AL133445, AL109798, |
| | | | | AC009470, AC005746, AC004030, AC009516, |
| | | | | AC011479, AL035704, AC013434, AC008784, |
| | | | | AC002430, AF053356, AL031847, AC007546, |
| | | | | Z95116, AC004517, AP001068, AL035659, |
| | | | | AL109797, AL021154, AL022476, AP001067, |
| | | | | M33132, AL031848, AF001548, AF207550, |
| | | | | AC027644, AC006480, AP000502, AC007954, |
| | | | | AL121586, AC008812, AL355385, AC005089, |
| | | | | AL133153, AC005102, AL136231, AL110215, |
| | | | | AC016025, AC005399, AP001727, AC009247, |
| | | | | AF190465, Z82194, AL035088, AJ011930, |
| | | | | AC005594, AL163300, AC004686, AC004893, |
| | | | | AC008155, AL049870, AC007956, AC005619, |
| | | | | AF111169, AL049795, AP002085, Z97333, |
| | | | | AC025594, AP001432, AC006211, AC003110, |
| | | | | AP000067, AL355392, AC004593, Z93015, |
| | | | | AL121914, AC005874, AF134471, AC008764, |
| | | | | AC003663, AC009314, U91318, AP000151, |
| | | | | AF111168, AL136135, AL034417, AC008623, |
| | | | | AC004876, AC023105, AL031589, AB020859, |
| | | | | AC011811, AL031255, AF134726, AL158193, |
| | | | | AB016897, AL031681, AC007993, AL035404, |
| | | | | AC007957, AC018758, AC012472, AC025765, |
| | | | | AL135749, AC007850, AC006077, AL031658, |
| | | | | AL031283, AL031722, AB023054, AC003003, |
| | | | | AL133229, AC006088, AL138807, AL137073, |
| | | | | AC003002, U78027, AC002300, AC006057, |
| | | | | AL109925, AC005871, AL121981, AC005911, |
| | | | | AC005324, AC010328, AL137230, AC004388, |
| | | | | AC009600, AC009721, AL356299, AL353807, |
| | | | | AL035455, AC005513, AL162615, AC006538, |
| | | | | AC005837, AC008745, AJ251973, AL033383, |
| | | | | AL023803, AL078584, AC005098, AL049872, |
| | | | | AL109923, AC004971, AL163279, and AP000356. |
| 13 | HTAHS92 | 112 | 1042420 | AW207577, AI075265, BF840301, AI873914, |
| | | | | T96046, T96036, AK026704, AC008760, |
| | | | | AC009410, AC018676, AC020910, AC011749, |
| | | | | AC010135, and Z60397. |
| 14 | HAROV59 | 24 | 1272018 | AL358532. |
| 14 | HAROV59 | 113 | 1209631 | AL358532. |
| 15 | HDCCG73 | 25 | 1243884 | AA730365, AI061294, BE154945, AP001715, |
| | | | | AC004966, AL352979, AL118525, AP001671, |
| | | | | AP001716, AC008556, and AP000404. |
| 15 | HDCCG73 | 114 | 1209263 | AW975626, AW976024, AW973789, AW974658, |
| | | | | AW970942, AW974806, AA730365, AI061294, |
| | | | | AW979160, AW974986, AW971953, BE154945, |
| | | | | AW973821, AW972440, AP001715, AC004966, |
| | | | | AP001671, AL118525, AL352979, AC008556, |
| | | | | AP000404, and AP001716. |
| 16 | HQAHD50 | 26 | 1243837 | BF437711, AI817776, AI970996, BF476543, |
| | | | | AI400849, BE645938, AI972893, AI762586, |
| | | | | AA730695, AI201489, AW016419, AI799832, |
| | | | | AI380706, AI675646, AI669800, AI658490, |
| | | | | AI919017, AI418072, AI468338, BE645813, |
| | | | | Z65567, and Z65568. |
| 16 | HQAHD50 | 115 | 1209703 | BF437711, AI817776, AI970996, BF476543, |
| | | | | BE645938, AI400849, AI972893, AI762586, |
| | | | | AW016419, AA730695, AI380706, AI201489, |
| | | | | AI799832, AI658490, AI675646, AI669800, |
| | | | | AI919017, AI418072, AI468338, BE645813, |
| | | | | Z65567, Z65568, AA121716, AA130776, |
| | | | | AA146672, AA149359, AA416552, AA569970, |
| | | | | AA290712, AA994552, AI312518, and AI187723. |
| 17 | HROBA16 | 27 | 1243878 | BF834863, AA772704, AA577770, AW469214, |
| | | | | R67262, AW160615, AL355094, AC004491, |
| | | | | AJ277546, AC007193, AC024075, AC004983, |
| | | | | AL365505, AC003982, AL080243, AL162430, |
| | | | | AL354720, Z83840, AC009314, AC006483, |
| | | | | AL132653, AC007404, AC004953, AC008736, |
| | | | | AC008068, AC004477, AL050335, AP001748, |
| | | | | AC004971, AC008403, AL137073, AL031005, |
| | | | | AP000692, AL121753, AP001747, AP000347, |
| | | | | AL031311, AC005520, AC002044, AC027319, |
| | | | | AC004223, Z83822, AF038458, Z84466, |
| | | | | AC012442, AC005668, Z83826, AL118520, |
| | | | | U47924, AL022313, AC009086, AC016637, |
| | | | | AC004743, AL035689, AL008582, AC009228, |
| | | | | AC004655, AL133245, AC005355, AL031659, |
| | | | | AC004448, AL353802, AL049776, AC007298, |
| | | | | AC020663, AC009756, U80017, AF053356, |
| | | | | AC011500, AC004150, AC016601, AC024561, |
| | | | | AC005261, AC006334, AC006064, AC007312, |
| | | | | AL121574, AP001725, AC007191, AC011445, |
| | | | | AP001660, AC004531, AL031289, U95740, |
| | | | | AL022323, AC083871, AC004967, AC011491, |
| | | | | AL445220, Z85986, AC004000, AC004815, |
| | | | | AC005004, AP000550, AL132639, AC004841, |
| | | | | AC005519, AC005288, AC003029, AL138976, |
| | | | | AC005971, AC005585, AC010326, AF168681, |
| | | | | AC008018, AC004765, AC005372, AC010463, |
| | | | | AL132713, AC011529, AC011442, AP001713, |
| | | | | AC005839, AL139109, AC002425, AC007285, |
| | | | | AL137802, AC005529, AC004257, AL121653, |
| | | | | AC002565, AC011444, AL109804, AC007383, |
| | | | | AC005103, AC004104, AL020993, AF047825, |
| | | | | AC004882, AC007957, AL137853, AC010422, |
| | | | | AL021940, AC005844, and AC016830. |
| 17 | HROBA16 | 116 | 1218577 | AL355094. |
| 17 | HROBA16 | 117 | 1046802 | BF834863, AA772704, AW160615, AA577770, |
| | | | | R67262, AW469214, AL355094, AC004491, |
| | | | | AJ277546, AC024075, Z83840, AC003982, |
| | | | | AC004983, AC012442, AC004953, AL121753, |
| | | | | AC004477, AC004967, AL132653, AC008068, |
| | | | | AL035420, AP000692, AL050335, AL354720, |
| | | | | AL118520, AL365505, AC007404, AC004971, |
| | | | | AP001660, AP001747, AL035689, AC006483, |
| | | | | AC009314, AL035405, AC008736, AC011445, |
| | | | | AC006334, AC008403, AP001748, AL031005, |
| | | | | AC005520, AC005844, AC004743, AC024561, |
| | | | | AC010326, Z83822, AC011442, AC002352, |
| | | | | AL022323, AC027319, AF038458, AL031659, |
| | | | | AC007298, AL022313, AC004655, AC016637, |
| | | | | AL049776, AC005668, AP000347, AL137073, |
| | | | | AL008582, AL031311, AC009228, AC002044, |
| | | | | AL133245, AL109804, AC005971, AC005839, |
| | | | | U47924, AC007312, AC020663, AL020997, |
| | | | | AC011464, Z83826, AP001713, AL021940, |
| | | | | AF053356, AL158040, AL118505, AL022318, |
| | | | | AC016601, Z85986, AC004887, AC004000, |
| | | | | AL031289, AC083871, AC004223, Z84466, |
| | | | | AL121574, AC004150, AL163249, AC011529, |
| | | | | AL353802, AL080243, AC005261, AC009756, |
| | | | | AC020750, AC006064, AL049636, AC011491, |
| | | | | AL445220, AC008018, AC009086, AL132639, |
| | | | | AC007285, AC005519, AL121653, AL138832, |
| | | | | AC004448, AL133448, AP001714, AC011444, |
| | | | | AC005529, AC016543, AL356299, AC005355, |
| | | | | Z95114, AF168681, U80017, AL137059, |
| | | | | AC004104, AC004882, AC016830, AC004383, |
| | | | | AC010463, AC008770, AC005004, AL121928, |
| | | | | AL136369, AJ297357, AL158198, AP001729, |
| | | | | AF064861, AL354696, AL132713, AC004890, and |
| | | | | AC011500. |
| 18 | HTPJD12 | 28 | 1262048 | BF032776, AA492506, BE501761, AI380126, |
| | | | | AW753589, BE742519, AA772096, AW959236, |
| | | | | AI051248, AI796046, N78680, AW104821, |
| | | | | AI923995, AW194429, AI082180, BF034807, |
| | | | | AA468796, W86908, AA214384, W35375, |
| | | | | N73147, W32940, AI640542, AW971155, |
| | | | | W15186, AA294934, AW050468, R92821, |
| | | | | T82084, AW170216, BF592081, AA211695, |
| | | | | T81773, AI905700, AW837086, AA354566, |
| | | | | AC007655, and AC083862. |
| 18 | HTPJD12 | 118 | 1209268 | BF032776, AA492506, AI380126, AW753589, |
| | | | | BE742519, AW971155, BE501761, AW959236, |
| | | | | AA772096, AI051248, AI796046, N78680, |
| | | | | AI923995, AW104821, AW194429, AI082180, |
| | | | | AA468796, BF034807, W86908, AA214384, |
| | | | | W35375, N73147, W32940, AI640542, W15186, |
| | | | | AA294934, R92821, T82084, AW050468, |
| | | | | AW170216, BF592081, AA211695, T81773, |
| | | | | AI905700, AW837086, AA354566, and |
| | | | | AC007655. |
| 19 | HHAWD13 | 29 | 1272864 | BF926344, BF333687, BF743657, BG179438, |
| | | | | AW630972, AW409772, AV717730, BE887537, |
| | | | | AV713988, AV757469, AV717397, BE886223, |
| | | | | AV713143, AV758017, BG171892, AV763927, |
| | | | | AV715229, AV760840, AV760969, AV713908, |
| | | | | AV717125, BE890608, AV713689, BE904681, |
| | | | | BF365864, BE888844, BE908306, BF033687, |
| | | | | BF034209, AA838230, BG031447, AV716915, |
| | | | | AV762389, BG035988, AV757975, BF033366, |
| | | | | BG113811, AV734800, BE905336, BE787806, |
| | | | | AV715556, AV756771, AI440091, AA148136, |
| | | | | BF726605, AW084248, AW023232, AI285434, |
| | | | | AV713309, AW007955, AA579241, BG030733, |
| | | | | AV758314, BF338493, AW950745, AV716133, |
| | | | | AI972170, AV717021, AA679272, AI583929, |
| | | | | W05480, AW118404, BG029162, AV733344, |
| | | | | BG252807, AV716265, BG036404, AI075084, |
| | | | | AV733451, AV716931, AI572892, AA633937, |
| | | | | BE874783, BE544129, AV760775, AA493908, |
| | | | | BG113182, BE380056, BE901666, AW090102, |
| | | | | BF130819, AV712838, BG119390, AL121146, |
| | | | | AI057027, AI333853, AA600777, BG108382, |
| | | | | BE908215, N27767, AV710912, AA635860, |
| | | | | AI292058, BG059449, AI183904, AA483076, |
| | | | | BF339067, BE744765, AW975407, AA932675, |
| | | | | AI242233, T41228, BG253551, BF218351, |
| | | | | AW073805, AI912423, AV755497, AI952657, |
| | | | | AI719778, AA187167, AI027979, AI249439, |
| | | | | AA411834, AA482866, AI191108, W04856, |
| | | | | BE908679, F35748, AA666372, AI024383, |
| | | | | BF033570, AA397446, AI313428, AI355277, |
| | | | | T48049, AA416786, BE276808, AA508756, |
| | | | | BG059103, AI884379, AA533244, BG114175, |
| | | | | AW103780, AA587004, AI073952, AW469210, |
| | | | | AI813902, AI355270, AA961692, T56180, |
| | | | | AI679377, AA525997, BE909902, AV713635, |
| | | | | AV757419, AI740739, AI867005, F25762, |
| | | | | AW264701, AA640068, AA983430, AA417156, |
| | | | | AV758606, AI431435, AA665306, AI679886, |
| | | | | AA420669, W07728, BE889330, AA155816, |
| | | | | AI254343, AV733721, BF131139, AA181280, |
| | | | | AW674566, AI049606, AI783861, AA146782, |
| | | | | BE273236, BG253383, AA595603, AW263401, |
| | | | | F24867, AW082906, AW020063, AW189058, |
| | | | | AA630236, BE737953, AA864455, AA622812, |
| | | | | BF526927, AI830918, AI382639, AA844493, |
| | | | | BG028891, AV716158, AV756424, BG168277, |
| | | | | AA147015, BG035757, BG253202, AV712278, |
| | | | | AI262341, AA747395, AI337471, AW189208, |
| | | | | AA493848, AW474911, AA846825, AA659067, |
| | | | | BF036306, AV761886, AA665053, AI698500, |
| | | | | AA193409, AI084619, BG110782, AU134685, |
| | | | | BF435945, BE907243, W52576, W44429, |
| | | | | AW044191, BF245102, AV733800, N78613, |
| | | | | T56667, AA022676, AA946832, AA824266, |
| | | | | AI087406, AA188068, AI499000, AI085716, |
| | | | | AA132465, AA583879, D54354, AA523332, |
| | | | | AI814223, AI203929, AI670720, AI872025, |
| | | | | AI719143, W56488, N91907, AI149985, |
| | | | | AI024403, AI719727, AA420868, AA723043, |
| | | | | AI355658, AW262820, AF090913, S54005, |
| | | | | M92381, M20259, Y11587, AL162008, U68233, |
| | | | | I92592, AK027164, AJ000937, I89947, AX019230, |
| | | | | AK024538, AL137550, AL050092, I48978, |
| | | | | AX019229, X79812, AL117457, I48979, A08916, |
| | | | | AL117585, AF116631, AL137459, AL110280, |
| | | | | AF119899, AL122050, AF119878, AF090900, |
| | | | | AL442082, AF116691, AF090943, AF218014, |
| | | | | AL133606, AL359618, AK026045, AF130066, |
| | | | | AB047615, AF111851, AK025958, AF217987, |
| | | | | AF116602, AF132205, AF130082, AL080124, |
| | | | | X82434, I33392, AK025339, U58996, AK027146, |
| | | | | AL122049, AK026744, ALF119909, AF116682, |
| | | | | AL122093, AF113694, AL049314, AF017152, |
| | | | | AL050116, AL050277, I89931, A08913, |
| | | | | AF130059, AL389982, AK000618, AF113019, |
| | | | | Y11254, AL359596, M30514, AL117583, X84990, |
| | | | | AL110221, AL133075, AF158248, AL050393, |
| | | | | AF008439, AK000432, AK025084, AK026741, |
| | | | | AL389939, AL050149, AL096744, AK000391, |
| | | | | AF113677, AB050410, AL049382, AK026506, |
| | | | | AK000212, AB048974, AJ238278, AK026927, |
| | | | | AR011880, AK025391, AF116646, E07108, |
| | | | | AL359941, AK027096, AF119875, U42766, |
| | | | | AK025967, AL050024, AL133640, AL117460, |
| | | | | AF242189, S68736, AL050108, AB048953, |
| | | | | AK025414, AL359601, AF061795, AF090903, |
| | | | | AF151685, AF106862, A08910, AF314091, |
| | | | | AF113690, AE113689, A65341, AK000445, |
| | | | | AK025092, AF130105, AL110225, AL117435, |
| | | | | AK000718, AB019565, AR087170, S36676, |
| | | | | AK026526, AK026480, AL133080, Y16645, |
| | | | | AL137557, AK026164, AL133016, AF146568, |
| | | | | S61953, AF091084, AR083266, AL049300, |
| | | | | AF116644, A08909, A90832, AB051158, |
| | | | | AB048954, S78214, AX027129, AR038854, |
| | | | | AF116688, AF090934, AL049452, AF130055, |
| | | | | AK026353, AK026959, AK027182, AF130075, |
| | | | | AR079032, AF125948, X63574, AK026855, |
| | | | | AF078844, U77594, E03348, AK024992, |
| | | | | AF159141, AK026592, AL162006, AK026630, |
| | | | | AL133557, AF113013, AK025484, AL353956, |
| | | | | AL050138, A03736, AX026824, AX026823, |
| | | | | A58524, A58523, AL162083, AK026597, |
| | | | | AK000137, AF177336, AK026542, AK025491, |
| | | | | I66342, I00734, AB034701, AF067790, AK000614, |
| | | | | AF097996, AK026057, AK027160, L31396, |
| | | | | AL133568, U80742, AL133072, L31397, |
| | | | | AL133560, AF118070, AF138861, AL157431, |
| | | | | AF090896, AX040958, AL117394, AF116639, |
| | | | | AF130104, E00617, E00717, E00778, AF118064, |
| | | | | AL389978, AL110196, AB041801, AF210052, |
| | | | | AK000083, AF116649, AL049464, AL390167, |
| | | | | AL049466, AL050146, AB048964, AK026642, |
| | | | | AL133098, AF116654, AK025349, AK026452, |
| | | | | AF125949, AF113691, AF260566, AF090901, |
| | | | | AF208026, AF056191, E02221, AF079765, |
| | | | | AK026591, A93016, I26207, AL137283, |
| | | | | AF177401, E04233, AL049430, AL390154, |
| | | | | E02349, AF219137, AF111847, AL442072, |
| | | | | AF185576, and A08912. |
| 19 | HHAWD13 | 119 | 1209632 | BF365864, BF743657, and A W891104. |
| 20 | HISFI83 | 30 | 1243886 | AW978652, AW271597, AI076921, BF056989, |
| | | | | AI767684, AA429775, AA258066, AI922382, |
| | | | | AI689445, AW517678, AW300599, BF382632, |
| | | | | AI221849, N33450, AI243200, AW293699, |
| | | | | AA258684, AW196901, AW001761, BE350684, |
| | | | | N34663, AI889086, BF697102, AA278560, |
| | | | | AA781749, AA279378, AA781748, AA505791, |
| | | | | AW129213, AW957294, AA442866, N71815, |
| | | | | AW953593, Z45035, AA709377, T74234, |
| | | | | AA812710, AA352494, R63304, F12572, |
| | | | | AA258589, AA442865, H00263, Z40767, |
| | | | | AA852429, BE931765, AA852430, AI245143, |
| | | | | AA954436, F05368, R63305, H00264, N44600, |
| | | | | T88952, F10188, F01620, AA642668, AI088408, |
| | | | | BE218685, AV702722, and D87455. |
| 20 | HISFI83 | 120 | 1209270 | AW978652, AW271597, AI076921, BF056989, |
| | | | | AI767684, AA429775, AA258066, AI689445, |
| | | | | AW517678, AW300599, AI922382, N33450, |
| | | | | AI889086, AI221849, BF382632, AI243200, |
| | | | | AA258684, AW196901, AW293699, BE350684, |
| | | | | AW001761, AA781749, N34663, AA442866, |
| | | | | AA781748, AA278560, BF697102, AA279378, |
| | | | | AA505791, AW129213, AW957294, AA812710, |
| | | | | AW953593, N71815, Z45035, T74234, AA442865, |
| | | | | AA709377, AA352494, R63304, F12572, |
| | | | | AA258589, H00263, Z40767, AA852429, |
| | | | | BE931765, AI245143, AA852430, AA954436, |
| | | | | F10188, F05368, R63305, H00264, T88952, |
| | | | | N44600, F01620, BE218685, AA642668, |
| | | | | AI088408, AV702722, and D87455. |
| 21 | HISFV70 | 31 | 1253160 | AI539118, W20054, AI866754, N91453, |
| | | | | AI143495, AW383130, AA195793, AI378995, |
| | | | | AL514765, AW827289, AW372903, AI627985, |
| | | | | BG029829, AF119896, AL133016, U80742, |
| | | | | AF116602, A65341, AK026648, X99257, |
| | | | | AK024538, S78214, AL122050, AL137459, |
| | | | | S56212, AF116639, AL049466, E03348, |
| | | | | AK026086, I33391, AF130092, AF188698, and |
| | | | | S68736. |
| 21 | HISFV70 | 121 | 1209259 | AI539118, W20054, AI866754, N91453, |
| | | | | AI143495, AW383130, AA195793, and AI378995. |
| 22 | HNSAB41 | 32 | 1268184 | BE739592, BG165006, BG105699, AV690200, |
| | | | | AV692456, BF666897, BF696358, BF697847, |
| | | | | BE891061, BG165370, AV686169, BF666680, |
| | | | | BF967755, BF696365, BF666285, BF029934, |
| | | | | BF698234, BF700761, BF696359, BF698503, |
| | | | | BF698021, BF667900, BF666952, BF665797, |
| | | | | BF593954, BE958612, BE958515, BF668554, |
| | | | | BF439364, BF670202, AW613123, BF699229, |
| | | | | BF664617, BE958087, BF700926, BE739347, |
| | | | | BF381642, BF669635, BF695972, AI569980, |
| | | | | BF032034, BF697105, BE958350, BF542034, |
| | | | | BF665003, BF382058, BF701837, BE958295, |
| | | | | BF246840, AI753956, AW779376, BE536963, |
| | | | | BF700216, AA554040, BF967109, BF246687, |
| | | | | AW583705, AI580191, BE567846, BF695871, |
| | | | | AI864614, BF669697, AI922513, BF695585, |
| | | | | BF195797, BE959288, BG104703, D60241, |
| | | | | AW663134, AA566088, H48650, AI682800, |
| | | | | AA595575, AI453646, T50769, R68048, |
| | | | | BF131792, N63391, T50929, C15568, D60751, |
| | | | | R32457, C15261, D81750, D81691, R24902, |
| | | | | H48485, BG104876, BF700708, AA155685, |
| | | | | AK027169, and AB041548. |
| 22 | HNSAB41 | 122 | 1212804 | BE739592, BG165006, BG105699, AV690200, |
| | | | | BF666897, AV692456, BE891061, BF696358, |
| | | | | BF697847, BG165370, AV686169, BF666680, |
| | | | | BF967755, BF666285, BF696365, BF696359, |
| | | | | BF029934, BF665797, BF698234, BF667900, |
| | | | | BF698503, BF698021, BF700761, BF666952, |
| | | | | BF593954, BE958087, BE958612, BF665003, |
| | | | | BE958515, BF668554, BF439364, AW613123, |
| | | | | BF699229, BF664617, BE958350, BF700926, |
| | | | | BE739347, AI569980, BF697105, BF542034, |
| | | | | BF700216, BF246687, BF382058, BF381642, |
| | | | | BE958295, AI753956, BF670202, AW779376, |
| | | | | BF032034, AA554040, BF967109, BE536963, |
| | | | | BF701837, BE567846, BF669635, AI580191, |
| | | | | BF695972, AI864614, BF669697, AI922513, |
| | | | | AW583705, BF695585, BF195797, BF246840, |
| | | | | BF695871, BG104703, AW663134, BE959288, |
| | | | | AA566088, D60241, H48650, AI682800, |
| | | | | AA595575, AI453646, T50769, R68048, |
| | | | | BF131792, N63391, T50929, C15568, D60751, |
| | | | | R32457, C15261, D81750, D81691, R24902, |
| | | | | H48485, BG104876, BF700708, AA155685, |
| | | | | AK027169, and AB041548. |
| 23 | HOCNY94 | 33 | 1278041 | AW953965, AV655645, BE018334, BF342070, |
| | | | | BF792146, AV703695, AL040243, AW301409, |
| | | | | BG260037, BG179993, AL135661, AW087445, |
| | | | | BG058398, BF792469, AI497733, BF726198, |
| | | | | AI802542, AI318280, AI702406, AI269205, |
| | | | | AI811344, BF794994, AW827203, AL044207, |
| | | | | AI610645, BF344652, AW103371, AV681759, |
| | | | | AL043326, BG112879, BF971016, BE874133, |
| | | | | AI690426, BE781369, AI281762, AL121328, |
| | | | | AW129202, AI799199, AI580984, BG151247, |
| | | | | AL513907, AI440239, AI249257, BG031815, |
| | | | | AI682841, AI912866, BE048071, AI538716, |
| | | | | BG120816, AI857296, AW002342, AI612913, |
| | | | | BF038106, AI539153, AI564719, BG036846, |
| | | | | AI868831, AI633419, AI625079, AI682720, |
| | | | | AW026882, AW274192, AW071349, AI620284, |
| | | | | BF812933, BG058208, AW071417, AV681987, |
| | | | | AI439087, AI872074, AI433157, AI284020, |
| | | | | AI678302, AI568870, AI499463, AI636445, |
| | | | | AW118512, AW131954, AI539771, AW196141, |
| | | | | AI554484, AI866608, BF724691, AI281779, |
| | | | | BF055737, AW183130, BG168696, AI475451, |
| | | | | AI569616, BG180996, AI702433, AI224992, |
| | | | | AW827249, AV681951, AI950664, AL513911, |
| | | | | BF673434, AI498579, AI866002, AL048871, |
| | | | | AI433976, AI884469, BF970446, AI445025, |
| | | | | BF795712, BE963035, BF343172, AI800453, |
| | | | | AW104724, AI800433, AV756122, BF525438, |
| | | | | AV755668, AL119049, BE963918, BE881061, |
| | | | | BF344479, AL047763, BG253026, AW169653, |
| | | | | BF965836, BG164371, BF725868, AW238730, |
| | | | | BE047952, AI888953, AI828731, AI921379, |
| | | | | AL036146, BE894455, AI271786, AV757943, |
| | | | | AI590120, BE018711, AW169671, AL121270, |
| | | | | BF812961, AL036396, AI612920, AI610756, |
| | | | | AI635461, AI570384, AI349004, AL513837, |
| | | | | AI440426, AI250293, AV755207, BF883916, |
| | | | | AI349772, AI636456, AI475371, AI648684, |
| | | | | BF885675, AV682335, AI269696, AV660662, |
| | | | | AI758437, AI521012, AI349645, BG110684, |
| | | | | BE964812, BE966388, AI934137, AI872711, |
| | | | | AI862144, AV682162, AL045500, AI432969, |
| | | | | AI273142, BE904051, AI613017, AI097248, |
| | | | | BF527014, AI590128, BF970731, AV681647, |
| | | | | AV682249, AI500077, AL045903, AL038565, |
| | | | | AV682809, AV729334, AI445165, AV758209, |
| | | | | AI445432, AV682289, AI922901, AI554427, |
| | | | | BF969228, AI242249, BG257535, AI636719, |
| | | | | AI567351, BF812938, BE964700, AI619502, |
| | | | | AL121463, AI540832, AV760409, AI934011, |
| | | | | BF037930, BF817926, AI340582, AI349933, |
| | | | | AI609331, AV756992, AL514819, AW268253, |
| | | | | AI697137, AW195957, AW162071, AI538790, |
| | | | | AI568855, AV723953, AW132034, AV757705, |
| | | | | AW129171, BE891101, AI597750, AI290154, |
| | | | | AW090013, AV757797, BG222103, AW074993, |
| | | | | AV682672, AI349614, BF968041, BE048026, |
| | | | | AI281837, AV757737, BF341801, BF726421, |
| | | | | BF882343, AI308032, AI673710, AI572787, |
| | | | | AI282281, AW082040, AW075351, AI815855, |
| | | | | AA508692, AI312152, AI538829, AI536638, |
| | | | | AI624668, AW151485, AV704928, AI869367, |
| | | | | BF970449, AI274541, AK026855, I89947, |
| | | | | AF116631, AF130104, AR079032, I48979, |
| | | | | AF090900, AF116639, AF116644, AL050393, |
| | | | | AF090903, AF078844, AF118070, AL122050, |
| | | | | AJ242859, AL157431, AP001666, AB049758, |
| | | | | AF113013, I89931, AF106862, AF090901, |
| | | | | AL133640, AL133075, AL050116, AB048953, |
| | | | | AL110221, AB047615, AF118064, AL133016, |
| | | | | AF111847, S68736, S78214, AF113691, |
| | | | | AK026608, AK026741, AF113694, AF090943, |
| | | | | AF119899, AB041801, AL133557, AF116602, |
| | | | | AL117457, AL133565, AF113677, AK025958, |
| | | | | AL162006, AX046603, AF130059, AF130092, |
| | | | | AL117460, AL137527, AL389978, A93016, |
| | | | | AK025339, AF130105, AB019565, AF113676, |
| | | | | AF116691, AL442072, AL080137, AF113690, |
| | | | | AF090934, AF119875, AB048964, AF218014, |
| | | | | AL049452, X84990, AF116646, AF130075, |
| | | | | AF130082, AL442082, Y16645, AL050149, |
| | | | | AF125949, AL110196, AL390167, AX019230, |
| | | | | AL080060, AL050146, A08916, U42766, |
| | | | | AL133093, AK026045, AL049314, AL080124, |
| | | | | AF219137, AF090896, AF113019, A08913, |
| | | | | AF113689, Y11587, AJ000937, AL359596, |
| | | | | AR059958, AK026865, AF138861, AL162083, |
| | | | | AF116688, AF119878, AF017152, AL133606, |
| | | | | AF104032, L31396, L31397, AX019229, |
| | | | | AL122121, AK025084, AL050108, E03348, |
| | | | | AF116649, AF158248, AL122093, AL359601, |
| | | | | AX006092, AL049938, AL050277, AL389982, |
| | | | | AK026744, AL137557, AL049466, AK000212, |
| | | | | AK025772, AF113699, AL137283, AL122123, |
| | | | | I48978, Y11254, AK000618, AL133560, |
| | | | | AK000083, AF125948, E07361, AF207829, |
| | | | | AK026533, AL133080, AF111851, AK027096, |
| | | | | AL137459, AC004837, U91329, X63574, |
| | | | | AK026784, AL096744, AK000652, AF119909, |
| | | | | AF314091, AL117394, AK000445, AL110225, |
| | | | | AL050138, AF091084, AK025092, AF146568, |
| | | | | AL359618, AK026592, AL359941, AF079765, |
| | | | | X82434, AB051158, AF271350, AB048954, |
| | | | | AK000137, AR087170, AF242189, AK024538, |
| | | | | AF116682, AL049382, AK026452, AK026927, |
| | | | | E07108, AB052191, AK026504, A65341, |
| | | | | AL353940, AR011880, AF097996, AK026583, |
| | | | | AL117583, AJ238278, U00763, AF177401, |
| | | | | AL353625, AF017437, AK027113, AK026647, |
| | | | | AK026542, AL049430, AL137550, AC018767, |
| | | | | X70685, AF225424, AK026532, AK025491, |
| | | | | AL117585, AK026534, AL359615, A08910, |
| | | | | AL049464, AK026086, AF067728, AX042059, |
| | | | | AK025967, E02349, A08912, AL049300, |
| | | | | AK026353, AB047904, AF177336, AC006840, |
| | | | | AK026959, AF130077, and AF119871. |
| 24 | HAROG72 | 34 | 1281478 | BG030787, BF342483, BE777852, AF062713, |
| | | | | AW962150, AV762135, AV712960, AV725819, |
| | | | | AA306731, AW247858, AI052532, AV716692, |
| | | | | AI278003, AV723548, BE047593, AI887776, |
| | | | | AV728257, BG026292, AW148694, AW898553, |
| | | | | AA034516, AI168715, AW630982, AI191223, |
| | | | | AW304793, AA025373, AI810804, BF798240, |
| | | | | BF984626, AI792362, AA025374, AW051344, |
| | | | | AA962385, BF957364, BF958687, AA132199, |
| | | | | AA029525, AW439563, AA536183, AW474986, |
| | | | | AI567232, AA029460, AI088927, BF928249, |
| | | | | AW879285, AI457389, BF760131, AU147226, |
| | | | | BF826830, BF828714, W87430, AA251931, |
| | | | | AI806055, AW102811, BG260565, AI885218, |
| | | | | AV762783, BG028665, AA974092, N28450, |
| | | | | AL138265, BG109399, AW021737, R99679, |
| | | | | AW886566, AW089550, AW118108, AA565273, |
| | | | | H82553, AV733710, H49190, AA534064, |
| | | | | AI452969, AI239787, AU148007, AA634991, |
| | | | | AA694128, AU145476, H43461, AW157180, |
| | | | | AW131249, BF840910, AI147206, BF738001, |
| | | | | AW967632, AI791864, H99688, AU140392, |
| | | | | U25759, AI433104, AI583978, AV727816, |
| | | | | AL041013, AV760723, BE155132, AU157011, |
| | | | | AA973562, AU148853, H27161, AL134691, |
| | | | | AA782322, BF894632, AW963982, BE148835, |
| | | | | AA864439, BG010084, BF930994, AA287618, |
| | | | | AC024563, AL121881, Z95114, AC022148, |
| | | | | AC005228, AC004047, AL138715, AL163202, |
| | | | | AP001464, AL031683, AC006017, AL121958, |
| | | | | AF205588, AL117339, AC009296, Z86064, |
| | | | | AL022318, AC004006, AC004112, AL139350, |
| | | | | AL356801, AC027689, AC009318, AC002386, |
| | | | | AL136438, AC020728, AL008729, AC005010, |
| | | | | Z98304, AC006484, AC006007, AC007099, |
| | | | | AC005870, AC011460, AC007002, AL034421, |
| | | | | AF000573, AC003029, AC004948, AC009289, |
| | | | | AP000352, AF240786, AP000351, AC018755, |
| | | | | Z75889, AC006062, Z97206, AC006262, |
| | | | | AC007785, AC007030, AL137851, AL132776, |
| | | | | AL163303, AJ011932, AL034399, AL355871, |
| | | | | AC018765, U80460, AC023511, AL157375, |
| | | | | AE000658, AL354896, AC005562, AC010726, |
| | | | | AL121985, AC002523, Z77249, Z99716, |
| | | | | AC006504, AC007679, AL121947, AC006080, |
| | | | | AC008407, AL445984, U66083, AC010151, |
| | | | | AC004460, AP001686, AP001255, AC009499, |
| | | | | AL163247, AC000085, AP001729, AP000154, |
| | | | | AP000012, AP001413, AC007965, AL357497, |
| | | | | Z99569, AC035149, AC011440, AL034347, |
| | | | | AL133216, Z84486, AC005627, AL136295, |
| | | | | AL356865, AL096870, AC010507, AC078847, |
| | | | | AC009952, AL354696, AJ243211, A90827, |
| | | | | Z97180, AC005488, AL021917, AL163152, |
| | | | | AC012065, AC000100, AC073893, AL354777, |
| | | | | AC008082, AL355136, AC007241, AL163278, |
| | | | | AF064859, AC003681, AL109922, AC010165, |
| | | | | AC004875, AC005006, AC009946, AC009430, |
| | | | | AB050248, AC022324, AC022209, AC006518, |
| | | | | AC009414, AC012596, AC004844, AC007740, |
| | | | | AL359218, U82670, AB039887, AL110292, |
| | | | | AC021036, AC034235, AC008626, AC003086, |
| | | | | AC021107, AC006994, AC004382, AC018633, |
| | | | | AL135818, AP000350, AL049766, AL139327, |
| | | | | AC040171, AC006084, AL355101, AF064858, |
| | | | | AL163285, AC007151, AL442167, AL136097, |
| | | | | U82696, AL138889, AC005323, AP000500, |
| | | | | AC026165, AB026899, AC027121, AL021878, |
| | | | | AC018738, AP000689, AC073934, AP000512, |
| | | | | AB003151, Z98751, AC008483, AC018448, |
| | | | | AC010620, AC068811, AL158135, AF265340, |
| | | | | AL035409, Z92545, AC007786, U40455, |
| | | | | AL163300, AJ011930, AP001068, AC079462, |
| | | | | AC012077, AP001748, AP001629, AC010609, |
| | | | | AC073607, AL442124, AL136979, AC008649, |
| | | | | AP002532, AC012049, AB045357, AC002094, |
| | | | | Z95115, AC010168, AC006500, AC008795, |
| | | | | AC022027, AL136981, AC005697, AC009276, |
| | | | | AB023051, AC008519, AC005047, AC007270, |
| | | | | AC008887, AL109654, AC008599, AC007999, |
| | | | | AL390027, Z95152, Z98949, AL117341, |
| | | | | AC008816, AL133162, AL356513, AC003046, |
| | | | | AC010329, Z84814, AL391297, AF250841, |
| | | | | AL390865, AC020741, AC010682, AC006166, |
| | | | | AC011422, AC017093, AP001601, AP001698, |
| | | | | AL021997, AC009169, AP001724, AC007967, |
| | | | | AC006153, Z83839, AC079844, AC006024, |
| | | | | AC073054, AL117351, D87009, AL121969, |
| | | | | AC005157, AE000659, Z84718, Z83745, |
| | | | | AC005326, and AC004993. |
| 24 | HAROG72 | 124 | 1209767 | BF871137, AW970877, AA457070, AV739452, |
| | | | | AA493708, AI733856, AI473475, BF814725, |
| | | | | BF854308, BF750422, AI284640, AV763354, |
| | | | | BF805088, BF812839, AV724586, AV762098, |
| | | | | BF677892, AV764241, BE085529, AI933658, |
| | | | | AA828802, AA826134, AA828771, AA828781, |
| | | | | BF939548, AI858864, AA503119, AI859438, |
| | | | | AW179306, BF883012, BE969845, AF190464, |
| | | | | AL157838, AL035413, AC005399, AL161670, |
| | | | | AL121754, AL049829, AC011895, AC005907, |
| | | | | AC011811, AC006345, AC005808, AC011470, |
| | | | | AC008760, AC020728, Z93017, AC005041, |
| | | | | AC002299, AC005697, AL034420, AC027319, |
| | | | | AC004019, AC005080, Z70280, AC007226, |
| | | | | AC021036, AL035587, AC009477, Z81364, |
| | | | | AL133545, AL096701, AF243527, AL022165, |
| | | | | L78810, AL049776, AC005486, AC008745, |
| | | | | AC009470, AL031311, AL035086, AC005412, |
| | | | | AC005102, AL133264, AC006312, AC005520, |
| | | | | AF130342, AL390738, AL031584, Y18000, |
| | | | | AC007220, AC019210, AL008635, AC002350, |
| | | | | AL135927, AC007227, AP001717, AC002544, |
| | | | | AC005191, AC005736, AC005837, AC008733, |
| | | | | AL136137, AC019014, AC018764, AC011442, |
| | | | | AC003684, AC006537, AC004805, U52112, |
| | | | | AL109976, AC005914, AC004826, AC004000, |
| | | | | AL133245, AP001725, AC007546, AL109802, |
| | | | | AL023553, AL033527, AC006441, AC005527, |
| | | | | AP001752, AC005529, AC004525, Z99716, |
| | | | | AP000692, AL162831, AC002470, AP000302, |
| | | | | AC007383, AC003041, AL160175, AC004887, |
| | | | | AC006538, AC006251, AC002347, AC009079, |
| | | | | AC009086, AL133399, AC004491, AC008750, |
| | | | | AL159152, AC005209, AL162615, AC006077, |
| | | | | AC005844, AL080243, AC004382, AC005632, |
| | | | | AC009194, AL121900, AC005081, AL117348, |
| | | | | AC005952, AL022476, AL031295, AC005330, |
| | | | | AC022148, AC008818, AC005332, AC006211, |
| | | | | Z93015, AC006329, AC005899, AJ003147, |
| | | | | U82696, AC004965, AC008403, AC005037, |
| | | | | AC010326, AX039602, AL157384, AC008649, |
| | | | | AC005821, AL163207, AC005668, AC007537, |
| | | | | AC004799, AC074191, AC002558, AL031005, |
| | | | | AL078582, AL121774, AC004409, AC010206, |
| | | | | U78027, AC005921, AL158141, AC024168, |
| | | | | AC016395, AC006948, AC006120, AL121653, |
| | | | | AL136172, AC010553, AC008101, AC002303, |
| | | | | AP001038, AL445215, U85195, AC006157, |
| | | | | AC006515, AL160151, AF225899, AF168787, |
| | | | | AL118519, AC012627, AL121981, AC004531, |
| | | | | AC007388, AC004149, AC007536, AC003982, |
| | | | | Z85986, AC004821, AP000114, AP000046, |
| | | | | AC002395, AC009004, AL035422, AE000658, |
| | | | | and AL023284. |
| 25 | HDACT07 | 35 | 1280454 | AL514243, AL528669, BE727059, BF960481, |
| | | | | AW387524, AI936906, AW965563, BF217740, |
| | | | | AI571397, AA488594, AI803613, AI214239, |
| | | | | AI417396, N50028, AW338022, AA235147, |
| | | | | AI823751, AI368040, AA992177, AA421340, |
| | | | | AI858747, AI198887, AW449010, AW368669, |
| | | | | AA292917, BF911808, AA251487, AA628248, |
| | | | | N49834, N25148, AA962410, BE677918, N64841, |
| | | | | BF571574, AI682311, BF507582, BE698813, |
| | | | | AI671417, BE219109, AA233350, AW236372, |
| | | | | AI803615, AU150048, AA251193, BE891454, |
| | | | | AW993185, BF593581, T08369, R68180, |
| | | | | AI673705, AI023199, BF366797, AA853228, |
| | | | | AA401751, AA421476, BE826031, AA853227, |
| | | | | BF372580, AA301138, AA770503, BF349685, |
| | | | | BF088846, AA234748, BE933062, AI908330, |
| | | | | R68181, AW190824, AW887341, BG009919, |
| | | | | AW965567, BE873056, AI123146, BF359951, |
| | | | | T59421, D20855, T59477, BF088321, N54683, |
| | | | | AI290041, BF813682, N75692, AA972005, |
| | | | | BF371427, AW797678, BE716020, AI972792, |
| | | | | BF822473, BE928624, AA233443, AI183958, |
| | | | | BF922373, BF359353, and AK022823. |
| 25 | HDACT07 | 125 | 1209253 | BE873056, AA251487, BF359951, AA233350, |
| | | | | AW965563, BE891454, AU127479, T08369, |
| | | | | BF571574, BF372580, AA301138, AA319705, |
| | | | | BG009919, BF371427, BF813682, BE882092, |
| | | | | AA972005, BF922373, BE727059, and |
| | | | | AK022823. |
| 26 | HLTIJ80 | 36 | 1034753 | AC004507. |
| 26 | HLTIJ80 | 126 | 1046031 | AW772231, AI628760, and AC004507. |
| 27 | HNTZG72 | 37 | 1246154 | BE075065, AI753488, AV758870, BE043920, |
| | | | | BF885741, C06046, AV760469, C18083, |
| | | | | BG222269, AF196969, AC005081, AL023553, |
| | | | | AL021918, AL121926, AC012446, AC001228, |
| | | | | AC008745, AC003108, AC006441, AC005324, |
| | | | | AL096840, AC004913, AL136969, AC011500, |
| | | | | AC011462, AC004707, AC006965, AC005527, |
| | | | | AC011495, AC000025, AC004914, AC083875, |
| | | | | AC005778, AL157713, AL020993, AC004526, |
| | | | | AL109897, AC008848, AC005231, AC008392, |
| | | | | AL008582, AC004150, AC005553, U07561, |
| | | | | AC002553, AC006312, AC010150, AC012627, |
| | | | | AL117382, AC004475, AC068799, U95742, |
| | | | | AL031255, AC005225, AC007240, AF001549, |
| | | | | AL022302, AL135749, AL022165, AL356244, |
| | | | | AC010326, AC004922, AC009314, AL023284, |
| | | | | AP000349, AL136231, AC008379, AL133174, |
| | | | | AL356299, AP000509, AC016995, AF243527, |
| | | | | AL161905, AL353807, AF217796, AC005488, |
| | | | | L48038, D84394, AC008372, U52112, AL096701, |
| | | | | AC005529, AL078644, AL353194, AC010291, |
| | | | | AC007850, AP001711, Z99716, AC026439, |
| | | | | AC027319, AP000961, AC009301, AC005829, |
| | | | | AC005046, AC004703, Z73417, AC000026, |
| | | | | AL121891, AL117336, AP000555, AC005512, |
| | | | | U47924, AC011491, AL161938, Z82178, |
| | | | | AC008892, AC008521, AC011444, AC004965, |
| | | | | AL031666, AF045555, AC007731, AC004765, |
| | | | | AC006064, AF010238, AC005670, AL096791, |
| | | | | AC006160, AP001725, AL136179, Z94721, |
| | | | | AL031680, AC005500, AC002472, AC007277, |
| | | | | AC009511, AC004996, AC006337, AC005632, |
| | | | | AC005914, Z98742, AC006581, AL159168, |
| | | | | AC008519, AC010463, AC009247, AL163283, |
| | | | | AL031295, AC011489, AC005013, AL137059, |
| | | | | AC000159, AC020663, AC020750, AL133245, |
| | | | | and AC006084. |
| 27 | HNTZG72 | 127 | 1209378 | BE075065. |
| 28 | HNUCE33 | 38 | 1275160 | AL047045, AI810840, AA453163, BG105390, |
| | | | | AI384012, BF675676, AI580098, AA847601, |
| | | | | BE465717, AV702308, AI743043, AI140310, |
| | | | | AI275910, AA496037, AW169938, AW302619, |
| | | | | AI990162, AI683202, AA976888, AA235887, |
| | | | | AI080761, BF105912, AA292967, AA947702, |
| | | | | AA398374, AI915809, AA236971, AI679067, |
| | | | | AA861155, BF690995, BF673125, AI187078, |
| | | | | BF671654, AA644201, R71690, AW769518, |
| | | | | AI831892, AI334002, T94071, AI205587, |
| | | | | BE697944, AI799793, BF671393, AA397540, |
| | | | | AW841936, BE697973, AW591306, AI286327, |
| | | | | BE928278, R45381, AI919197, AA904036, |
| | | | | Z25172, BF810391, BF436497, AA009755, |
| | | | | BF084095, AW968019, AA009646, AI247693, |
| | | | | R49618, AI222632, BF027853, H17649, |
| | | | | AL047044, N35425, D45539, BF991093, F09385, |
| | | | | T94148, Z40038, BF446066, AW582847, |
| | | | | BE161358, AI628827, AW879374, BE832740, |
| | | | | AW994806, AW879360, BE832690, AA779150, |
| | | | | BE150929, AW879368, AW879442, BE832676, |
| | | | | BE832651, BE832724, BE832745, BE832646, |
| | | | | BE832749, AW879378, BE832743, BE832680, |
| | | | | BE832691, AW879371, BE832649, BE774568, |
| | | | | BE832728, AW879444, AW879351, AW879366, |
| | | | | BE832726, AW879347, AW879293, BE832721, |
| | | | | AW879333, AW879348, AW879359, BE697941, |
| | | | | AW879439, AA252673, AW879399, AW795305, |
| | | | | H17765, BE832688, AW879473, BF790133, |
| | | | | BE810268, AW879349, AW879441, AW008391, |
| | | | | AA613997, AA435878, AL514473, AI619502, |
| | | | | AL514087, AI862139, AL514791, AI564719, |
| | | | | AI270183, AI274013, AI632851, AI572787, |
| | | | | AI677796, AL514357, AA507158, AL514983, |
| | | | | BE966388, AL513907, AW169527, BF526526, |
| | | | | AI889376, AI538085, AL513999, AI824557, |
| | | | | AI289937, AI476046, BF904265, AL513901, |
| | | | | BF812938, AI869367, AL513977, AI680498, |
| | | | | AI434468, AL514691, AL513807, BF812961, |
| | | | | AW075413, AI274508, AI538716, AL514627, |
| | | | | AL513553, AI433157, AI702073, AL513911, |
| | | | | BE965891, AA449768, AI569583, AI799199, |
| | | | | AI926790, AW879354, BE967261, AI567351, |
| | | | | BG181066, AL513693, AW075667, AL514093, |
| | | | | AW029611, AI636719, AI273964, AI863321, |
| | | | | AW104724, AI280747, AI366900, AW102785, |
| | | | | AW190042, AI699865, AI554821, AI630928, |
| | | | | AL514823, AI634345, AI271786, AL514359, |
| | | | | AW149869, AI873644, AI247293, AI569328, |
| | | | | BF970652, BE966577, AL513779, AI287326, |
| | | | | AL514793, BE964994, AL513809, AL513687, |
| | | | | AW148320, AL515413, AW087938, AL513577, |
| | | | | AL513763, AL513755, AL514015, AL513991, |
| | | | | AI609592, AI439745, AI828731, AI863382, |
| | | | | AI536638, BF814453, BG180046, AW235482, |
| | | | | AI445025, AI357316, AI828818, AL514409, |
| | | | | AL513597, AI623396, AI591040, AI539808, |
| | | | | AI633125, AL514155, AI499381, AI635464, |
| | | | | AL514919, AI624548, BG165323, AL514867, |
| | | | | AW131294, AI439762, AL514579, AL513631, |
| | | | | AI282355, AI499131, AL514899, AI590227, |
| | | | | BF725644, AI610690, AI671679, AL514657, |
| | | | | AL513555, AF293366, AC008176, AL121656, |
| | | | | AF130082, AF116631, AF119875, I48979, I48978, |
| | | | | AF116602, AF090900, AF130104, AB052191, |
| | | | | I89947, AL117457, AF113694, S61953, AF130059, |
| | | | | AF026124, AL137533, AK000083, AL389982, |
| | | | | AB038698, AF116688, AL096744, AL137523, |
| | | | | AF177401, AL080060, AL049314, AF090943, |
| | | | | A08916, A08913, AL162062, AK026744, |
| | | | | AF113690, AK026045, AL359601, AJ000937, |
| | | | | AF113013, E07108, AK027164, AF090934, |
| | | | | X84990, Y16645, AX019230, AK026480, A77033, |
| | | | | A77035, AL359620, AL162006, AF130066, |
| | | | | AL442082, AK027096, AL162008, AF130105, |
| | | | | AL359618, AL110196, U42766, AB049892, |
| | | | | I89931, AF116639, AX019229, AB048953, |
| | | | | AF138861, AK026741, AL117460, AL122093, |
| | | | | AF078844, AL137550, AF116691, AK024538, |
| | | | | AL137557, AL390154, AL133640, AK025391, |
| | | | | AK026583, AF079763, AF116644, AF130099, |
| | | | | AF113699, AL137459, AF090903, AF146568, |
| | | | | AF119899, AL133080, AF116682, AK026927, |
| | | | | AB049758, AL353940, AK026534, AF104032, |
| | | | | A08910, Y11254, AL122050, A08909, AL359615, |
| | | | | AF125949, AF158248, AF111847, AK026452, |
| | | | | X65873, S78214, AF090901, AR011880, |
| | | | | AF125948, AF218014, AL050149, AK025484, |
| | | | | AK026855, AF116649, L31396, U78525, L31397, |
| | | | | AL049430, AF097996, AF087943, AB047615, |
| | | | | AL359596, AL133072, AF008439, E07361, |
| | | | | AF113019, A65341, AF225424, AF113691, |
| | | | | AF242189, AL050116, AB052200, AF130077, |
| | | | | AX006092, AL080124, AL050393, X72889, |
| | | | | AK025798, X82434, AL049452, AF090896, |
| | | | | AF113677, AK026542, AR087170, AK026528, |
| | | | | AF119909, AK025084, AL133075, AL389939, |
| | | | | AL353625, AF091084, AK025339, AK026959, |
| | | | | AL050277, AF130075, AR079032, AL442072, |
| | | | | AF106862, AK026630, AF118064, X70685, |
| | | | | AJ242859, AF116646, AL353956, U35846, |
| | | | | AB051158, AK000614, AK026642, AF217987, |
| | | | | AK000212, AK026784, AK025092, I00734, |
| | | | | S68736, AL137527, AL117435, A03736, |
| | | | | AK026865, AL122123, AL122110, AK026504, |
| | | | | I33392, AB048954, AK026600, AL133557, |
| | | | | AL110221, E00617, E00717, E00778, AL050108, |
| | | | | AK000391, AL137480, AF314091, AL359941, |
| | | | | AL162083, AK026086, AK025967, AK000323, |
| | | | | AF175983, AF113676, AK026532, AL117394, |
| | | | | AL049300, AK026592, AL049938, AK025958, |
| | | | | AF183393, AJ238278, AL133016, AF260566, |
| | | | | AL050146, AL133560, AB019565, AK000618, |
| | | | | AF113689, I66342, AF130055, AL049283, |
| | | | | AX020124, E02349, AK025414, AL035458, |
| | | | | AF219137, AL133565, AL133606, AL122121, |
| | | | | AK027114, AF119878, AK000137, AX040974, |
| | | | | AK026462, AF262032, AK025772, A08912, |
| | | | | AF079765, AK024588, AB041801, AL117583, |
| | | | | AF116654, AF056191, AX040958, AL122049, |
| | | | | Y11587, AB047904, AF119865, AB048919, |
| | | | | AF119871, AL157482, AL110225, AF130110, |
| | | | | AF111112, AX026824, AK024524, AX026823, |
| | | | | and A58524. |
| 28 | HNUCE33 | 128 | 1209149 | AV753557, AL047045, BG164060, AI810840, |
| | | | | AA453163, BE612569, AW968019, BG105390, |
| | | | | AI384012, BG121257, AW162396, AA436948, |
| | | | | AI580098, BF675676, AA732323, AA847601, |
| | | | | BE465717, AW295116, AV702308, AI480288, |
| | | | | AI140310, AI275910, AI743043, AA496037, |
| | | | | AA461195, AI703240, BF671654, BF690995, |
| | | | | AW169938, AA009645, AA009755, AA397540, |
| | | | | BF105912, AW302619, AI683202, BF027853, |
| | | | | H17765, AI990162, AA976888, AA235887, |
| | | | | AI080761, BF673125, AA292967, AA947702, |
| | | | | AA398374, AA236971, AI915809, AL047044, |
| | | | | AA861155, BF810391, AI187078, BF671393, |
| | | | | AA252673, AI094148, AI915790, AI679067, |
| | | | | AI246899, R71690, AW769518, AI831892, |
| | | | | AI334002, AA644201, BF790133, AW172420, |
| | | | | AI205587, T94071, AI799793, BE697944, N35425, |
| | | | | AW841936, R68928, BE697973, BE890287, |
| | | | | AW591306, AI286327, Z43980, BE928278, |
| | | | | AI919197, AA904036, R45381, AW008391, |
| | | | | Z25172, R34745, R21290, BF436497, F11727, |
| | | | | BF084095, AA009646, AI247693, AI222632, |
| | | | | BF833775, R49618, H17649, W32783, D45539, |
| | | | | BG178952, AW393390, BF991093, F09385, |
| | | | | T94148, Z40038, BF446066, AW582847, |
| | | | | BF910900, BF886363, BG152273, BG152272, |
| | | | | BE161358, AI628827, AA779150, AW879374, |
| | | | | BE832740, AW994806, AW879360, BE832690, |
| | | | | AW879368, AW879442, BE832651, BE832676, |
| | | | | BE832724, BE150929, BE832745, AA613997, |
| | | | | BE832646, BE832749, AW879378, AW879371, |
| | | | | BE832743, BE832680, BE832691, BE832649, |
| | | | | BE774568, BE832728, AW879444, AW879351, |
| | | | | AW879366, BE832726, AW879293, AW879347, |
| | | | | BE832721, AW879333, AW879348, AW879359, |
| | | | | BE697941, BE222367, AW879439, AW879399, |
| | | | | AW795305, BE832688, AW879473, AA521309, |
| | | | | BE810268, AW879441, AW879349, AW138831, |
| | | | | AA435878, AA984310, AA507158, AW879354, |
| | | | | AW879434, AW879476, BE243176, BE855524, |
| | | | | AF293366, AC008176, AC006987, and |
| | | | | AA883799. |
| 29 | HODEM32 | 39 | 1253127 | M62006, AL036896, AA610381, AW151541, |
| | | | | AA669238, AW974363, AL041375, AL041924, |
| | | | | AW265468, BG180320, AL121039, AI702049, |
| | | | | AI754926, BG110480, BE273825, AI254267, |
| | | | | AV759766, AW148821, AA832175, AW410844, |
| | | | | AA489390, AI797998, AW270468, AV761486, |
| | | | | AU157209, BE501670, AI473671, BE161469, |
| | | | | AA298365, AW020198, AW151848, N92588, |
| | | | | AU146487, AA814503, AI547110, AW084445, |
| | | | | AI284543, BF828756, AA425283, BG059139, |
| | | | | AV732057, AI572680, AI336771, AV710119, |
| | | | | BE139139, AI250552, AW243808, AV758870, |
| | | | | AL042735, AA729387, AI889995, AV730440, |
| | | | | AU160445, AW162314, AI251284, AI251203, |
| | | | | AI251034, BF965370, AW593631, AI914748, |
| | | | | AI270280, AA604601, AC005233, AL021877, |
| | | | | AC004453, AC005538, AL390039, AL355497, |
| | | | | AL034548, AC007030, AC005323, AC005678, |
| | | | | AP001719, AC005726, AC006487, AL137784, |
| | | | | AL121865, AF111167, AC008555, AC007676, |
| | | | | AP001684, AL133396, AL157931, AL023574, |
| | | | | AC002091, AC007883, AC007684, AC005048, |
| | | | | AL049594, AL136981, AC017006, AL049823, |
| | | | | AL024498, Z98745, AP000359, AC004125, |
| | | | | AC005243, AL354889, AC006948, AC004673, |
| | | | | AC005998, AL353788, AL121983, AL135787, |
| | | | | AL158040, AC005369, AL358975, AL109759, |
| | | | | AC005288, AL353140, AP001628, AC004041, |
| | | | | AC006080, AF011889, AC004106, AC007632, |
| | | | | AC006376, AL078645, AL031650, AC022073, |
| | | | | AC011479, AP001747, AC026881, D87675, |
| | | | | AL137129, AL359272, AL355980, AL136452, |
| | | | | AC024154, AC005207, AC006581, AP001695, |
| | | | | AL133240, AL121593, AL022345, AC005188, |
| | | | | AF111168, AL163302, AP000142, AC007748, |
| | | | | AJ400877, AB026898, AL009172, AC005696, |
| | | | | AC004185, Z93928, AL163282, AL031665, |
| | | | | AC007308, AC004089, AC005899, AC008806, |
| | | | | AL031311, Z93015, AP000509, AC008372, |
| | | | | AL031666, AL080243, AC005069, AC008543, |
| | | | | Z93020, AL022318, AL049856, AL158817, |
| | | | | AC007546, AF238375, AC007371, AC008394, |
| | | | | AL355385, AC011495, AC017002, AC005080, |
| | | | | AL121656, AL121914, AC006143, AC073934, |
| | | | | AC008569, AF205588, AC069277, D84394, |
| | | | | AC007881, AC025588, AL139109, AC011442, |
| | | | | Z84469, AL109976, AC018642, AL031255, |
| | | | | Z98950, AL139396, AL157838, AL034422, |
| | | | | AC004383, AC003982, U91327, AL117330, |
| | | | | AL391867, AC008379, AC027644, AJ003147, |
| | | | | AL035400, AF254822, AL133480, AL445483, |
| | | | | AC007993, AC011497, AC005484, AC024576, |
| | | | | AC005920, AC005274, AL360227, AC004881, |
| | | | | AF109907, AF067844, Z98200, AC007954, |
| | | | | AL139353, AC006064, AC005332, AC006006, |
| | | | | AL022476, AL158198, AC018758, AL136304, |
| | | | | AL049777, AF051976, AC007263, AC011491, |
| | | | | AC010358, AC006160, AC002477, AL354720, |
| | | | | AC019227, AC026736, AC008784, AL136298, |
| | | | | AC009314, AP000121, AP000053, AL096814, |
| | | | | AF243527, AC008760, AL031276, AL138976, |
| | | | | AC004686, AP001667, AF224669, AL121845, |
| | | | | AL049759, Z99716, AL157718, AC003969, |
| | | | | AL133243, AC010271, AC009086, AL136137, |
| | | | | Z94161, AL109935, AL035072, AC005694, |
| | | | | AC009362, AL009181, AL034423, AC004824, |
| | | | | AC000052, AC008567, AL353614, AP001441, |
| | | | | U52112, Z86090, AC083866, AC011451, |
| | | | | AC009079, AC005765, AP000168, AC004905, |
| | | | | AP001717, AC004019, AP001725, AC007637, |
| | | | | AC004543, AC005527, AL031772, AL133245, |
| | | | | AC003690, and AC000353. |
| 29 | HODEM32 | 129 | 1212873 | M62006, AC004070, and AC002412. |
| 30 | HPJHQ20 | 40 | 1261918 | BE883488, AC009518, AF035397, AJ009961, |
| | | | | AC007682, Z17254, and AB034604. |
| 30 | HPJHQ20 | 130 | 1209298 | BE883488, AC009518, AF035397, AJ009961, |
| | | | | Z17254, and AB034604. |
| 31 | HQADO95 | 41 | 1276422 | AI880874, AI080618, AV758790, AW131249, |
| | | | | AW055226, AI523839, AW089550, AI919265, |
| | | | | AU119532, AV756491, AI038990, BE393367, |
| | | | | AL119123, AI654285, AC003665, Z98743, |
| | | | | Z99916, AL109984, AP001672, AL096821, |
| | | | | AL357153, AC004659, AL137067, AL034395, |
| | | | | AC002553, AL355305, AC003664, AC007225, |
| | | | | AC002045, AC009492, AC009481, AC005233, |
| | | | | AC023425, AL021069, AL133246, AC004106, |
| | | | | AL161797, AC010169, AC004016, AC006350, |
| | | | | AC005034, AP001710, AC007344, AL049780, |
| | | | | AC004963, AC008269, AC008753, AC006116, |
| | | | | AC005874, AF134471, AL049834, AC008733, |
| | | | | AP000048, AL035696, AC006042, AL139353, |
| | | | | AC006948, AC005730, AC005070, AL354852, |
| | | | | AC004626, AL163279, U91323, AC005274, |
| | | | | AL138740, AC004526, AL035067, AC009313, |
| | | | | AC009194, AL034411, AC002303, AC004824, |
| | | | | AP001688, AL391122, AC007358, AL032822, |
| | | | | AF064861, AL022332, AL021940, AC008155, |
| | | | | AC005697, AC083874, AL031846, AP001700, |
| | | | | AC007955, AC007938, AP001667, AL049742, |
| | | | | AC012309, AL008709, AL096764, AC005411, |
| | | | | AC023430, AL024507, AL035089, AC005082, |
| | | | | AC003009, Z82899, AC020908, AC000065, |
| | | | | AC001228, AL035697, AC066590, AL117341, |
| | | | | AL049832, AP001708, AC010789, AC005295, |
| | | | | Z93241, AP000246, AL391839, AL353771, |
| | | | | AL031407, AL157694, AC002351, AC023796, |
| | | | | AL109928, AC008543, AC022596, AC009116, |
| | | | | AC004820, AL139383, AP002534, AL353804, |
| | | | | AL117186, AL359238, AL133405, AC006530, |
| | | | | AL163218, AC005971, AL139343, AC008038, |
| | | | | AP001685, AL078602, AC007364, AC005548, |
| | | | | AC007383, AL022395, Z95116, AL136139, |
| | | | | AL121969, AC010598, AC007528, AL050318, |
| | | | | AC002531, AP001678, AL135841, AL033525, |
| | | | | AL008721, AC002543, AC011742, AF205588, |
| | | | | AL133372, AL135783, AC006315, AP001699, |
| | | | | AL136000, AP000692, AL078624, AC004478, |
| | | | | AC004616, AC006256, AL021026, Z84483, |
| | | | | AC018642, AL355112, AC027119, AL137059, |
| | | | | AC008277, AC018634, and AC011452. |
| 31 | HQADO95 | 131 | 1209746 | AW963750, AL042853, AI306191, AI305894, |
| | | | | BE907585, AW089101, AI674174, BE277210, |
| | | | | BG113106, BE276480, AV733830, R44116, |
| | | | | AI470646, BE409047, BF030591, AW023149, |
| | | | | AW960545, AA468022, AL515875, BG002349, |
| | | | | AV759279, BF343686, BF197650, AA846952, |
| | | | | AV761211, AI421841, AI309375, AI751216, |
| | | | | AV761104, AW886681, AI254913, AI281730, |
| | | | | AW979252, F05324, AI333016, AI950983, |
| | | | | AA468131, AL133294, AC011489, AC007193, |
| | | | | AL135839, AL096702, AL035662, AL136169, |
| | | | | AC007682, AC009784, AL158067, Z81310, |
| | | | | AJ009615, AC002089, AC003658, AL031295, |
| | | | | AC002301, AL031055, AC008101, AL137794, |
| | | | | AC022308, AC008079, AL392084, AC073539, |
| | | | | AC009481, AL158040, AL008709, AC004743, |
| | | | | AL136131, AL158218, AC008249, AL022329, |
| | | | | AC004971, AC023510, AP001212, AC003691, |
| | | | | AC012598, Z83826, AC008958, AC026430, |
| | | | | AL078461, Z97181, AC007350, AL023284, |
| | | | | AC022543, AC003101, AL024498, AC007327, |
| | | | | AC009756, AL133387, AC009311, AB014078, |
| | | | | AC004209, AC006139, AL031575, Z97196, |
| | | | | AC006468, AP000514, AL450226, AC006344, |
| | | | | AC004592, AP000697, AL034351, AC002430, |
| | | | | AL137039, AL022336, Z98884, AC020755, |
| | | | | AC007263, AP000688, AC024162, AC026197, |
| | | | | AP001726, AL163248, AK027088, AL024508, |
| | | | | AL035415, AC005180, AL109823, AC002460, |
| | | | | AC002195, AC005701, AL139112, AL035455, |
| | | | | AC005768, AL031427, Z93023, AC005725, |
| | | | | AC002383, AL136306, AC007488, AC007400, |
| | | | | AC008394, AC011482, and AL031054. |
| 32 | HTENS88 | 42 | 1243927 | BF512513, BF698790, AW119226, BF791196, |
| | | | | AW500203, AA885462, BF349766, AA594588, |
| | | | | AI821697, BE146008, BE709669, AI968693, |
| | | | | BE738929, BF132258, AI690891, AA490875, |
| | | | | AA810000, AI221437, AA737278, AA707477, |
| | | | | AW300795, AW576517, AA827071, AA490949, |
| | | | | AA831539, AA810785, AI472106, AA826937, |
| | | | | N66975, AA482274, AA423813, AI613477, |
| | | | | AI800856, AU145366, AA166655, AV728911, |
| | | | | BF209807, AA680043, and AK021725. |
| 32 | HTENS88 | 132 | 1213009 | AW500203, AA594588, AI821697, BF512513, |
| | | | | BF698790, BF791196, and BF349766. |
| 32 | HTENS88 | 133 | 1045824 | BF512513, AW119226, BF698790, AA885462, |
| | | | | BE709669, AI968693, BE738929, BF132258, |
| | | | | AI690891, AA490875, AA810000, AI221437, |
| | | | | AA737278, AA707477, AW300795, AW576517, |
| | | | | AA827071, AA490949, AA831539, AA810785, |
| | | | | AI472106, AA826937, N66975, AA482274, |
| | | | | AA423813, AI613477, AI800856, AU145366, |
| | | | | AA166655, AV728911, BF209807, AA680043, |
| | | | | and AK021725. |
| 33 | HTLGC03 | 43 | 1261928 | BF732494, AI198873, AA861238, BF732473, |
| | | | | AA927155, AA906741, AL036187, AI656448, |
| | | | | BF344691, BF343568, AV682654, AL048656, |
| | | | | BF817402, AI868204, BG256090, AI494201, |
| | | | | AI251221, BG122481, AA807088, AI434833, |
| | | | | BF812933, AI805769, BE621256, BG168696, |
| | | | | F36859, BF038804, AV706987, AW149227, |
| | | | | BF061283, BG178911, BG112718, BF904189, |
| | | | | AW163823, AA287231, AL110306, AW235745, |
| | | | | BE968711, BF924882, AI433034, AI929108, |
| | | | | BG118829, AI582871, BE781369, AW963224, |
| | | | | BF885675, AI280670, BF814357, BE620444, |
| | | | | AI566724, AW274355, BF909758, BG253026, |
| | | | | AA613907, AA761557, AI866741, AW813006, |
| | | | | BG113299, AL036403, BE965121, AA493923, |
| | | | | AA635382, BE048087, BG110660, BF920893, |
| | | | | AW403717, BE964078, BG110259, BF924884, |
| | | | | AI932949, AW059828, BE886728, BF344652, |
| | | | | AW074993, BF812938, AI349614, R40432, |
| | | | | AI863321, AW071380, AI874151, AW169234, |
| | | | | AI343059, AW172723, AI312152, AV647118, |
| | | | | AW075084, AW131930, BG058039, AI499285, |
| | | | | AI349933, AI310925, BF340889, AV682466, |
| | | | | BE965621, AI349937, BE621472, AI680498, |
| | | | | BF726207, AW858254, AI922577, AW169604, |
| | | | | AI307708, BG253206, BE544111, BE880085, |
| | | | | AI866082, BE538466, H89138, AI620093, |
| | | | | AI573026, AI254727, BF814541, AI345608, |
| | | | | AI699011, AI307520, AI889147, AW088903, |
| | | | | AW151714, AW129230, AA580663, AI538342, |
| | | | | BF814453, BE965192, AI348854, AI307446, |
| | | | | AI345677, BF032768, AI539771, AI872910, |
| | | | | BF970186, BG107576, AI468872, AI866608, |
| | | | | BF751710, AL120853, BE874133, BG168185, |
| | | | | BG031664, BE964812, AV656932, AI805688, |
| | | | | BE965481, BE789764, AI684021, BG105800, |
| | | | | AI888621, BE966699, AI345471, BG251872, |
| | | | | AI582483, BF904265, AI366992, AW068845, |
| | | | | BE964497, AI886181, AI567582, BF092710, |
| | | | | AI801325, BE967255, AA494167, AI174591, |
| | | | | AL046463, BG105110, BE897632, BE965432, |
| | | | | BE885490, AW168031, AW020095, AI400725, |
| | | | | AW148356, AL037030, BG166654, AL120254, |
| | | | | AV717349, AW129271, AW827227, AI539687, |
| | | | | AI345347, BF753056, AW302965, BF213155, |
| | | | | BE785868, AA640779, AL047387, AW162189, |
| | | | | BF826445, BG029053, BF990285, AW827276, |
| | | | | AI371228, BE172689, AI802240, AW073697, |
| | | | | BF038131, AL036904, AL037558, AV738991, |
| | | | | AW151681, AI471361, BE622183, BG058150, |
| | | | | AL036631, BG029829, BG121959, BG001235, |
| | | | | BE964636, BE904051, BE965355, BE909398, |
| | | | | BE963838, AW268072, AI312428, AI815232, |
| | | | | BE138644, AA493647, BE895585, BF038675, |
| | | | | BE964981, BG029086, BF924869, AI312399, |
| | | | | AW268261, BF822127, AW021373, BF987113, |
| | | | | BG029667, AL514691, AW673679, BE172767, |
| | | | | AI336503, AI926790, BF699668, AI335426, |
| | | | | AI348777, AL045500, BG249582, N71180, |
| | | | | BE906419, BE543089, BE888592, AI345253, |
| | | | | AI307569, AA848053, AW858243, AI311159, |
| | | | | AW071377, AA579232, AL034550, AL133645, |
| | | | | I48978, AB019565, AK024538, AF185576, |
| | | | | A08916, I89947, AK026784, A08913, A08910, |
| | | | | A08909, AF155148, AF130100, AJ238278, |
| | | | | E00617, E00717, E00778, AB047904, AF166267, |
| | | | | AK026452, AK026542, AF079765, AK000618, |
| | | | | I89931, AL137459, A08912, AK026534, |
| | | | | AR087170, AL049300, Y10080, AK025573, |
| | | | | AL359618, AL122093, AL137527, AR038854, |
| | | | | AR070212, AF119909, AF079763, AK025632, |
| | | | | AK025383, I00734, AL133104, AF119899, |
| | | | | AL050024, AB041801, X62580, AF225424, |
| | | | | AK000083, AF155221, AK025465, AB051158, |
| | | | | AL137463, AL133080, A12297, AK025312, |
| | | | | AJ006417, AL122121, AB049848, I48979, |
| | | | | AL122123, U67958, AF113019, AK026647, |
| | | | | AK026855, AF130066, AK026504, AL389939, |
| | | | | I09360, AK000432, AK025084, AL080158, |
| | | | | AF261883, AF106657, AF081197, U72620, |
| | | | | AF081195, I41145, AL137429, AL049466, |
| | | | | AF159141, E04233, AF217966, AK000137, |
| | | | | A93350, AX010492, AF146568, AL122118, |
| | | | | AL080137, AK026608, X63574, AF118094, |
| | | | | E06743, AB050534, AL162062, AK025772, |
| | | | | AK000391, AL117394, AF067790, AF119337, |
| | | | | AK026464, AK026086, AF119875, AF218014, |
| | | | | AL162003, AL049382, AB048919, AK026959, |
| | | | | AK026885, AF116654, AF104032, AB034701, |
| | | | | AF026816, AL080074, AL080060, AX019230, |
| | | | | AX046603, AL137648, AK000250, AF242189, |
| | | | | AF285167, U00763, I26207, AL389978, A08908, |
| | | | | AK024601, AJ242859, AF130092, AF153205, |
| | | | | AF026124, AX020124, AF130075, AB052200, |
| | | | | AF125949, S78214, X65873, AL137300, |
| | | | | AF111112, AF162270, AF113694, AF113690, |
| | | | | AF116688, AF090934, AR038969, AK024588, |
| | | | | A65341, AK000445, AB050510, AB052191, |
| | | | | AF119871, AL133081, AK025958, AL117583, |
| | | | | AK025209, AX045627, AK000647, AL137538, |
| | | | | AL117460, AF017152, AF116646, AF130077, |
| | | | | AB049758, AF260566, AF217991, AK025484, |
| | | | | AL137273, AK026551, AL137294, AF113013, |
| | | | | AL133072, AX019229, X98834, AL390167, |
| | | | | AK026865, AF130104, AF078844, AK024524, |
| | | | | AK027113, A18777, Y16645, AK025391, |
| | | | | AL110196, AF119878, AK026642, Z72491, |
| | | | | AF177336, A90832, AF210052, AK025414, |
| | | | | AB048975, AK025349, E15569, AF090901, |
| | | | | AK000486, AL137665, AF175983, AK000718, |
| | | | | A93016, AL359941, AK027096, AF118070, |
| | | | | AK026057, AL359596, AB050533, AK026947, |
| | | | | AK027193, AB048974, AF183393, AK026630, |
| | | | | AL117585, AK025798, AL110221, AK026627, |
| | | | | AF125948, AF138861, AL157431, AX027129, |
| | | | | AL137488, AF260436, AL389982, AF130059, |
| | | | | X72889, X53587, AK027116, AL050277, |
| | | | | AF003737, AL133067, AF118064, AL137557, |
| | | | | AB048953, AK026480, AF116610, AF113699, |
| | | | | AL137523, AL049314, AF111851, AK025491, |
| | | | | AF130105, AK027200, AK000753, E07108, |
| | | | | A07647, AK025254, AX006092, AL359615, |
| | | | | AF158248, AL050146, AF111847, and AL157482. |
| 33 | HTLGC03 | 134 | 1212925 | BF732494, AI198873, AA861238, BF732473, |
| | | | | AA906741, AI656448, and AL034550. |
| 33 | HTLGC03 | 135 | 1227183 | BE277178, BF980634, BE732783, BE744869, |
| | | | | BF205108, BE734231, BE902466, BG178169, |
| | | | | AL043038, BG171519, BE298431, BF205706, |
| | | | | BG107935, BE793662, BE537334, BF794278, |
| | | | | BG035960, BE408797, BF307828, AA772073, |
| | | | | BF983678, BE386724, AV734233, BE909061, |
| | | | | BE251754, BE908982, BE734758, BE881757, |
| | | | | BE908194, AA421156, BE884675, BE252692, |
| | | | | BE379030, AV733932, AW263208, W07591, |
| | | | | BE742898, AI860213, BE813829, AW438684, |
| | | | | AA427665, BE272664, AW467358, AA397954, |
| | | | | AV740176, AW778811, AJ403113, BG167807, |
| | | | | AW675564, BE732299, AI348480, AW068454, |
| | | | | AW004828, AI129055, AW327370, AW070768, |
| | | | | AW769032, AI800035, R42232, AW249080, |
| | | | | AW081957, BF307853, R15335, AL041293, |
| | | | | BF032935, AI520752, AI695650, AI206299, |
| | | | | BF366342, AA935849, AA204944, AW248645, |
| | | | | AW769340, AW263189, AI656757, AW769555, |
| | | | | AA342016, AA035137, AA576268, BE540445, |
| | | | | AA293754, AA361461, AW573223, AW135932, |
| | | | | AW672887, BE794930, BF737443, BE409559, |
| | | | | AA330688, AA503645, AI917771, AA342017, |
| | | | | BE867818, BE737487, BE892849, BE279770, |
| | | | | BE275640, AI421042, BE252711, BE900859, |
| | | | | BF366402, AW007750, BF988458, BF856355, |
| | | | | BG151170, AK026991, and AL136295. |
| 34 | HTLKQ55 | 44 | 1243896 | AI203269, AI916973, BE045921, and AW846714. |
| 34 | HTLKQ55 | 136 | 1213423 | AW846714. |
| 35 | HTOJF42 | 45 | 1261944 | AW081398, AW327868, AW972312, AV764314, |
| | | | | AW339568, AI801600, BF724372, AW769399, |
| | | | | AI350211, AI357551, AI431303, AA469451, |
| | | | | AI471481, AI824562, AL046409, AV755070, |
| | | | | AL120502, AI284640, AI358343, AV761403, |
| | | | | AW265009, AI610376, BG059869, AA557686, |
| | | | | AA491814, AA714453, AI061334, AW498486, |
| | | | | AI859251, BE047069, AW962044, AW193265, |
| | | | | AU147800, AA513181, AI761471, AV719506, |
| | | | | BF668217, AV759204, AI053672, AI963720, |
| | | | | AW833898, AI635818, AA608616, BE042649, |
| | | | | AI669453, AI143242, AI889923, AI801591, |
| | | | | AI924251, AV763354, W79504, AI439360, |
| | | | | AW072587, AI537506, AW022379, AW168342, |
| | | | | AI379719, AI017415, BE044854, AI624698, |
| | | | | AW969866, AW301350, AA521323, AW574794, |
| | | | | AI821271, AW193432, AW303196, AA581903, |
| | | | | AV759362, AI160117, AI439210, AI245679, |
| | | | | BF939954, AU146531, AI709365, AI688846, |
| | | | | AI471572, AI364809, AA252763, AI653636, |
| | | | | AW960468, T15977, AA594215, AV741609, |
| | | | | AV742309, AA521399, AU158279, N62433, |
| | | | | AV742337, BF880649, AW269488, H70615, |
| | | | | AI189932, AV740801, AA831375, AV763971, |
| | | | | AW511743, AI539563, AV761188, AW008212, |
| | | | | BF797630, AV761608, AA594145, AA483771, |
| | | | | AV758994, BF725504, BF793766, BF590091, |
| | | | | AI298710, AI732186, AW662543, AA598586, |
| | | | | AI049634, BF725131, AW975981, AA652764, |
| | | | | AA810370, AA515224, AW063117, AW438643, |
| | | | | AI334443, AI619997, AI375710, AI475569, |
| | | | | AA857486, AA302963, AI339440, AA338486, |
| | | | | AW303876, BE350475, AW513362, AV762645, |
| | | | | AL048925, AI151261, AL040130, AA610491, |
| | | | | AI654588, AA062722, T07451, BF915839, |
| | | | | N25296, AV761317, AW673241, AA523843, |
| | | | | AI340453, BF854876, AW338086, BE160727, |
| | | | | AA426277, BE072475, AI469172, AA630030, |
| | | | | AI564454, F36273, AW270382, BF036387, |
| | | | | AI951863, BG152682, AA719805, AA806796, |
| | | | | AW474299, AA084070, BE742023, AW873290, |
| | | | | N55273, AI287651, AA632837, AI286264, |
| | | | | BF058000, T08638, AV759382, AW515861, |
| | | | | AW274349, AI457397, AW103758, BE883501, |
| | | | | F29702, AA831599, AI367975, AW874283, |
| | | | | AA828042, AW023672, AA877817, BF805147, |
| | | | | T06828, AA613345, AW972876, AI370878, |
| | | | | AI732120, AA525824, AA977743, AI281881, |
| | | | | AV700400, AU152722, AW302450, AI273185, |
| | | | | BF337291, AC006057, AL135927, AC007227, |
| | | | | AP000558, U80017, AC004955, AC016543, |
| | | | | AC005183, AC005043, AL023575, AL049870, |
| | | | | AC009516, AC005031, AC018751, AL137060, |
| | | | | AC005081, AC003104, AF015153, AC007220, |
| | | | | I51997, AC004999, AC008080, AC008764, |
| | | | | AC005231, AC002395, AL049830, AC010521, |
| | | | | AC007845, L78833, AL118506, AL033529, |
| | | | | Z97630, AC007437, AC010281, AC016025, |
| | | | | AP001732, AC004019, AP001711, L48038, |
| | | | | AL135744, AC002059, AC008687, AP001037, |
| | | | | AC008753, AC011495, AC007537, AF045555, |
| | | | | AC020947, AC000026, AC016554, AC007685, |
| | | | | AC005741, AL049709, AC005523, AC006277, |
| | | | | AC006037, AC006539, AC008569, AC008163, |
| | | | | AC011477, AC008892, AC005013, AC004139, |
| | | | | AL163246, AF261930, Z83822, AL022311, |
| | | | | AC008079, AL008718, AC008443, AC003109, |
| | | | | AC004228, AC004671, AL022476, AC006345, |
| | | | | AC005037, AC019227, AC004383, AL355478, |
| | | | | AC009756, AC004890, AC005520, AL034546, |
| | | | | AC020629, AC006547, AC009001, AP000034, |
| | | | | AF085444, D83989, AL023494, AC006131, |
| | | | | X76070, AC006014, AC026776, AP001725, |
| | | | | AC004867, AC016637, AC007043, AC007546, |
| | | | | Z69374, AC004971, AC004002, AL139099, |
| | | | | AL031846, AP000359, AC005701, AC005488, |
| | | | | AF015148, AL031602, AC007842, AC006023, |
| | | | | AC006544, AL117336, AC010618, AC020663, |
| | | | | AL157938, AC023105, AC006146, AL035413, |
| | | | | AL138721, AC004638, AL109827, AL158040, |
| | | | | AP000031, Z98950, AC004554, AL050341, |
| | | | | AC010197, AC009498, AC005098, U18390, |
| | | | | AL138741, AC003007, AC004943, AC011465, |
| | | | | AP000432, AL031589, AC006458, AC007957, |
| | | | | AL136137, AC011489, AL162414, AC005011, |
| | | | | AL136179, AP000213, AC005038, AC011442, |
| | | | | AP000692, AC018682, AL109804, AF279660, |
| | | | | AL109921, AL022302, AC008813, AC004477, |
| | | | | AP000135, AC007686, AC002349, AL136527, |
| | | | | AC002420, AL035662, AL390763, AC007666, |
| | | | | AF064864, AC010271, AC010748, U18394, |
| | | | | AP000553, AL049643, AC011455, AC006239, |
| | | | | AC006012, AC005180, AC006597, AP000352, |
| | | | | AC005632, AC005754, AL049633, AL136124, |
| | | | | AC005378, Z99774, AP001705, AP001748, |
| | | | | AC007014, AP001224, AC004149, AC004166, |
| | | | | AC006543, AL035685, Z82176, AP001713, |
| | | | | AC006064, AF077058, AC004966, Z95114, |
| | | | | AL009175, U73637, AL109759, AL009181, |
| | | | | AC011462, AC005375, AC005740, AC012150, |
| | | | | AL135783, AC006111, U04737, AL353739, |
| | | | | AC022027, X55930, AC006262, AC005225, |
| | | | | AC002538, AC008041, AL035681, U57007, |
| | | | | AL031650, Y07848, AL050321, U67221, |
| | | | | AL109798, Z98749, AL033527, AL109797, |
| | | | | AL133479, AC011599, AL133545, AF024533, |
| | | | | AL159977, AL031587, AL163283, AL353807, |
| | | | | AL021155, AC005785, AB011147, AC002303, |
| | | | | AL138807, Z74739, AL034553, AC005723, |
| | | | | AL121897, AC009506, AL034380, AP001671, |
| | | | | AP001629, AF165176, AC002379, AC011514, |
| | | | | AL050343, and AL022337. |
| 36 | HTPHC19 | 46 | 1284768 | AV760623, AA431025, AW600282, AW600279, |
| | | | | AI557017, AA737255, AA768281, and BF571514. |
| 37 | HDPHG50 | 47 | 1268191 | AI692675, BE222314, BE147139, H06337, |
| | | | | BG150512, F11466, AA887391, AI621341, |
| | | | | BF995171, AW163394, AI927233, AI564398, |
| | | | | AI474646, AI623941, AW051088, BF184134, |
| | | | | BG025897, AV681864, BF982265, AI918809, |
| | | | | AI918449, BE904851, AW983783, AI536923, |
| | | | | AW410259, AI950892, AL531436, AI872118, |
| | | | | BF925729, AV682190, AW073996, AA648480, |
| | | | | AI612913, AI860027, BG108189, AV756451, |
| | | | | AI432507, AV734425, AV732976, AV714341, |
| | | | | AV733869, AV681884, BG113863, AV758146, |
| | | | | AV757205, AV757362, AI439664, AV733824, |
| | | | | AW089272, AI630932, AI523806, BE967227, |
| | | | | AI401697, AI890907, AI475371, AV756247, |
| | | | | AI582932, AF117832, I48978, I89947, AL389935, |
| | | | | AK026534, Z97214, AF111849, AL049423, |
| | | | | A77033, A77035, AL133637, I48979, AL137480, |
| | | | | AL122100, AJ005690, AF217982, AF026816, |
| | | | | X83544, AK026542, AK027169, AF087943, |
| | | | | I33392, AL442083, U75304, AR034821, X61970, |
| | | | | and AF130055. |
| 37 | HDPHG50 | 139 | 1213570 | BE147139. |
| 37 | HDPHG50 | 140 | 1144654 | AL531656, AL531655, AL523800, BF341028, |
| | | | | BF339842, BG167581, BG164303, BE737156, |
| | | | | BF341038, BE908879, BF342686, AU139779, |
| | | | | BG260316, BF343615, AU139397, AI302100, |
| | | | | BG257913, AU147880, AI741706, AI820002, |
| | | | | AU148067, AW957065, AA772063, AU147303, |
| | | | | BG165749, AI669059, AI833004, AI809858, |
| | | | | AA613856, AU157378, AA147601, AI870387, |
| | | | | AA975340, AA973040, AA610202, AI816754, |
| | | | | AU157433, AW582946, AW275866, AI355268, |
| | | | | BF435132, AI128083, AW137856, AW025018, |
| | | | | AI340209, N29612, N25467, AI355997, |
| | | | | AA522616, AU157679, BF341352, AI818337, |
| | | | | AI624114, AU157053, BF940850, AI800730, |
| | | | | N24047, AI801451, BF742275, BF994357, |
| | | | | AA862639, AI240015, AI766024, AW168554, |
| | | | | AW029568, BG056582, BF061533, AU157329, |
| | | | | AI921514, AI570362, AV685526, AU158214, |
| | | | | AW029522, AW511826, BG236804, N41612, |
| | | | | AU157997, AU155872, AW262039, AI932807, |
| | | | | AU156343, AU157956, BF475463, AU156117, |
| | | | | AI089367, AU156451, AA452987, AU157115, |
| | | | | AI521638, AA975021, AW583152, AA933839, |
| | | | | AI431246, AV750535, AU155718, AW264924, |
| | | | | BE046385, N55269, AU158010, AA903723, |
| | | | | AI184811, BF154683, AU157041, AI560714, |
| | | | | AA149236, BG056837, AW952172, AW025224, |
| | | | | AW339117, AU155652, AI239967, AU156656, |
| | | | | AA452847, BF342427, AI376060, AI432072, |
| | | | | BF111546, BE247228, AI282593, AA148923, |
| | | | | AI248238, R73038, R73039, AW193421, |
| | | | | BF991003, AV686621, AA436817, AW881184, |
| | | | | H46397, AI207313, AI288275, BF942463, R76226, |
| | | | | AA329182, AI291769, AA149235, AA127914, |
| | | | | N35867, W73313, BE246062, BF847661, |
| | | | | AV751162, F25704, H45919, AW583296, F33694, |
| | | | | AA738370, H50617, AA366267, BE871527, |
| | | | | BG236861, D31336, AA987641, BF358443, |
| | | | | AW243129, T83871, R76225, F16325, AI240532, |
| | | | | R33363, H27296, R26702, H27107, AI368376, |
| | | | | R01103, AA148922, AA320502, AA147746, |
| | | | | R26925, BG002497, AA961249, D12414, D12442, |
| | | | | AI919360, AA442573, R39563, R01835, F00836, |
| | | | | T40026, N31508, AI832863, AA368870, N76878, |
| | | | | BF740085, AA502640, AI380175, AI269372, |
| | | | | AW882139, AI635861, AI707932, AI702513, |
| | | | | AI624470, AW584015, AA368869, BE826061, |
| | | | | BF995414, R39621, C21539, R33362, BG015093, |
| | | | | AL514627, AL514473, AL514919, AL513597, |
| | | | | AL513999, AL513553, AL513977, AL513907, |
| | | | | AL514721, AL513779, AL514015, AL514691, |
| | | | | AL514087, AL514791, AL513631, AL513693, |
| | | | | AL513901, AL513755, AV693527, AI909661, |
| | | | | AL513951, AL513979, AL514063, AL515235, |
| | | | | BF039003, AI446795, AI539153, AI612759, |
| | | | | AL514657, AL513817, AV655280, AI446606, |
| | | | | AI612885, AL514357, AL514409, AI475817, |
| | | | | AV726605, BG180996, AL513737, BG112718, |
| | | | | AL514867, AV727512, BF038131, AL120853, |
| | | | | BF970652, BF680131, AL513911, AI866770, |
| | | | | AL136653, AK002191, AB022718, AK026855, |
| | | | | AL117583, AL110221, S78214, AF116691, |
| | | | | AF314091, X62580, A08916, AK026086, |
| | | | | AF218031, I48978, AB052191, AL050149, |
| | | | | AB049900, S68736, I89947, AL137705, |
| | | | | AK026741, AF017152, AL122050, AF119871, |
| | | | | AL162006, AB041801, AL117460, AF130077, |
| | | | | AL389935, AL117457, AF116631, AL080127, |
| | | | | A08913, A08910, A08909, AL133560, Y16645, |
| | | | | AL049452, AF111851, AK026927, S61953, |
| | | | | AL049283, Y11587, AL049430, AF130082, |
| | | | | AF260566, AF177401, AF130066, AK024538, |
| | | | | AK000603, AF242189, AK026434, AF104032, |
| | | | | AF113690, I89931, Z97214, AF113019, |
| | | | | AK027096, AF113699, AK025084, AK026762, |
| | | | | AF106697, AL359601, AL133075, AL133565, |
| | | | | AR087170, AF119899, E02349, AL122098, |
| | | | | AL133568, AF130104, AK000137, AF130087, |
| | | | | AF116644, AF078844, AF113694, AF090943, |
| | | | | AJ000937, AL137459, AL122110, AF118064, |
| | | | | AF118090, AF116646, AK025772, E03348, |
| | | | | AB048964, AF118070, AL110196, AR075044, |
| | | | | AK025339, AK000083, AL133557, AF090903, |
| | | | | Y09972, AF138861, AF158248, AL157431, |
| | | | | AL442082, AF130059, AK026532, I48979, |
| | | | | AB051158, AL359941, AF097996, AB047615, |
| | | | | AF116602, E07108, AL096744, U42766, |
| | | | | AF113691, A03736, AF182215, AK026534, |
| | | | | AL162083, AK024588, AK026480, AK026583, |
| | | | | AK026947, AF130105, AB048975, AB052200, |
| | | | | AK000391, AL122093, AF116682, AF207829, |
| | | | | AR011880, AF116639, AF091084, AF090934, |
| | | | | AL050024, AL133080, AB050410, AK026959, |
| | | | | AK025092, AR059958, AK026630, AR079032, |
| | | | | L31396, AF090901, L31397, AL050116, |
| | | | | AX019230, AL137557, AF119875, AB048953, |
| | | | | A77033, A77035, AK026045, AK026744, U58996, |
| | | | | AL050108, AL110225, AL117435, AL389982, |
| | | | | AF106862, AB049892, AK000618, AF130055, |
| | | | | AK000445, AF116610, AF087943, AL353957, |
| | | | | AK000212, I66342, AK025431, AK025015, |
| | | | | AX046842, AL442072, AL050393, AF057300, |
| | | | | AF057299, I00734, AR038854, AF119883, |
| | | | | AF118094, S36676, A65340, AL049314, I17767, |
| | | | | AJ238278, AB047904, E00617, E00717, E00778, |
| | | | | AK025484, AF090896, AF079765, AX019229, |
| | | | | AF113013, AL122123, A93016, AL080124, |
| | | | | AB047887, Y11254, AF130100, AL117585, |
| | | | | AK025632, AL162062, AF090900, AL133016, |
| | | | | AF125948, AF113676, AF111847, A18777, |
| | | | | AK027114, AF113677, S63521, AK026642, |
| | | | | AF119865, AF119909, AL137648, AF079763, |
| | | | | AJ242859, AK000323, AL050146, AK026506, |
| | | | | AF185576, AK026600, AK026592, AX026824, |
| | | | | AX026823, A58524, A58523, AK000718, |
| | | | | AB019565, Y10655, AK000614, X82434, |
| | | | | AL137283, AF113689, AK026504, AF119878, |
| | | | | AK000432, AL133640, AK025958, AB048954, |
| | | | | AF177228, A93350, AK025312, AL117394, |
| | | | | A12297, AF130110, AL133606, X63574, |
| | | | | AF166267, AK000486, AK026542, I96214, |
| | | | | AR034830, AL133093, and AI801289. |
| 38 | HHEWS13 | 48 | 1243859 | BF331658. |
| 40 | HPJGT38 | 50 | 1209290 | AL118513, AL009181, AL109623, AC002302, |
| | | | | AC008738, AC021036, AL022316, AC007192, |
| | | | | AC011445, AL133353, AC008521, and |
| | | | | AC011475. |
| 41 | HTFMK11 | 51 | 1276752 | BE620294, BE620828, BE503158, AI718991, |
| | | | | BE467982, AI749303, AI707929, BG149952, |
| | | | | BE674357, AI434977, BF511462, R98920, |
| | | | | R98694, AI668979, AA082389, AI114869, |
| | | | | AI251284, AI251203, N57681, AI628859, |
| | | | | AL037856, AI251034, AI917132, BF868994, |
| | | | | BE139139, AI744830, AI250552, AA704393, |
| | | | | AI284543, BF772474, BE062478, T57767, |
| | | | | BE062476, AI223626, BF751949, AI254770, |
| | | | | AW575000, BE878926, AA622479, AA715814, |
| | | | | AV731013, AV742175, BF526832, AI609972, |
| | | | | AW410354, AW270433, AW965633, AI610360, |
| | | | | AW238253, AA427636, BE350953, BE042006, |
| | | | | BF854308, AW576081, AL537142, BE301584, |
| | | | | AV760508, BF991881, AV758067, AA158549, |
| | | | | BF527070, AA714011, AA719433, T40388, |
| | | | | AA836552, AI192440, AW516255, AW957372, |
| | | | | C06004, AL133153, AC006967, AC004025, |
| | | | | AL161670, AL022151, AF117829, AF131216, |
| | | | | AC023347, AL137159, AC024085, AP000079, |
| | | | | AC007029, AC004003, AL138735, Z98742, |
| | | | | AC005235, AP001746, AC005939, AC007558, |
| | | | | AC008774, AL031055, AC006013, AC013246, |
| | | | | AC005015, AC004891, AP000080, AL161936, |
| | | | | AL357519, AC004125, AC006457, AC004965, |
| | | | | AL033375, AL121947, AL353643, AC006017, |
| | | | | AC019172, AL159986, AF001549, AC009302, |
| | | | | AL049825, AC005375, AL445465, AC009429, |
| | | | | AP000081, AC004106, AC007739, AL096703, |
| | | | | AC006348, AL133467, AC007364, AC004682, |
| | | | | AC002418, Z83827, AC009492, AC004386, |
| | | | | AL162377, AC017093, AL031726, AC007401, |
| | | | | AC005486, AL034377, AC016601, AL137000, |
| | | | | AC006512, AF245226, AL163206, AF108083, |
| | | | | AC004843, AL136305, AC025470, AC007363, |
| | | | | AC008929, AL157360, AL034402, AC007128, |
| | | | | AP001674, AC007437, AC005036, AC002302, |
| | | | | AC007671, AC003091, Z84476, AL139375, |
| | | | | AL353152, AL023095, AC017100, AC008155, |
| | | | | AL359076, AL356020, AC006050, AE000659, |
| | | | | AC009314, AC008063, AC008555, AC002511, |
| | | | | AL157359, AL162811, AL160237, AC007969, |
| | | | | AC007686, AL121914, AC011526, AL159977, |
| | | | | AL122020, AL157789, AC007850, AC006406, |
| | | | | AL157937, AC008970, AP001748, AL356863, |
| | | | | AL355072, AC004592, AC025593, AL356913, |
| | | | | AL079304, AL138478, AC022516, AL132639, |
| | | | | AC069077, AL354985, AL445143, AC002464, |
| | | | | AL353777, AC005386, AC004985, AC004558, |
| | | | | AL118501, AC007360, AC074112, AP000500, |
| | | | | U52111, AL117339, AL132642, AC005482, |
| | | | | AL157361, AC006327, AL359332, AC004675, |
| | | | | AL137802, AC006145, AC004056, AF088219, |
| | | | | AC002351, AP001962, AL136979, AC009362, |
| | | | | AC005678, AC005284, Z77249, AL135936, |
| | | | | AC006332, AC006509, AC025765, AP000240, |
| | | | | Z98745, AC002084, AL353748, AC000119, |
| | | | | AC005521, AL109614, AC008064, AC012000, |
| | | | | AP001710, AC087087, AC006026, AC004952, |
| | | | | AC010132, AC078843, AC003664, AP001691, |
| | | | | AC005914, AL359694, AP001705, AL138976, |
| | | | | Z93931, AC007344, AP000245, AL022165, |
| | | | | AC008062, AP000140, AC007436, AC009890, |
| | | | | AL158167, AP000088, AC005552, AC005392, |
| | | | | AL450169, AL118511, AL109952, AC021058, |
| | | | | AP001754, AC002069, AB038490, AL133383, |
| | | | | AL049742, AC006480, AC006478, AC005102, |
| | | | | AC018637, AC010432, AL355112, AP001694, |
| | | | | AL158070, AC010485, AC074178, AC005226, |
| | | | | AL158812, AP001712, AL117378, AC026884, |
| | | | | AL034376, AP001729, AC007544, and |
| | | | | AC005094. |
| 41 | HTFMK11 | 142 | 1212928 | AW974663, AW972226, BF526832, AW976003, |
| | | | | BF751949, BF751953, BF751948, R97336, |
| | | | | BF725884, AW973814, AW505476, AA985391, |
| | | | | AI744306, BF918036, AW575000, AW103406, |
| | | | | AV754364, AI891070, BF984807, AU147851, |
| | | | | AA583394, T40388, AI537458, BF854308, |
| | | | | AL023284, AC005914, AC020955, AL442167, |
| | | | | AC006077, AL096840, AP001208, AL163285, |
| | | | | AL031651, AL133545, AF225899, AL138820, |
| | | | | AC004962, AC004884, Z98751, AF047825, |
| | | | | AL096701, AL132642, AC005379, AL133415, |
| | | | | AF002223, AC015973, AF111167, AC003950, |
| | | | | AC016601, AL138889, AC008403, AL137802, |
| | | | | U95739, AC008033, AC002350, AC005694, |
| | | | | Z82194, AC004089, AC000070, Z83822, |
| | | | | AL049692, AC009756, AC005103, AC005544, |
| | | | | AC005952, Z99716, AC005377, AC005971, |
| | | | | AL132855, AL117382, AC083862, AC009247, |
| | | | | AC004458, AP001725, AC026431, AL022165, |
| | | | | AL354984, AL049776, AL035420, AC002369, |
| | | | | AL136527, AL365445, AC002301, Z84572, |
| | | | | AC018751, AC025593, AC010267, AP001753, |
| | | | | AC010412, AC005005, AP000112, AP000044, |
| | | | | AC005527, AP001710, AL445705, AL157827, |
| | | | | AC011462, AC006538, AC008055, AC008745, |
| | | | | AL137800, AC006241, AL050335, AC007919, |
| | | | | AL080249, AC002352, AP002898, AL109797, |
| | | | | Z93015, AC016594, AL034395, AC020904, |
| | | | | AC024561, AC002365, AC008149, Z84469, |
| | | | | Z85986, AL049569, AC007686, AC007349, |
| | | | | AL109798, AC005251, AL096791, AL138878, |
| | | | | AP001666, U89335, AC004526, AL049696, |
| | | | | AC004859, AP001346, AL137796, AC005225, |
| | | | | AF001549, AC004167, AL138759, AD000684, |
| | | | | AL357752, AL049757, Z93017, AL136295, |
| | | | | AP001610, AC004924, U91321, AC021752, |
| | | | | AC003048, AC006312, AL023693, AC010170, |
| | | | | and AC004832. |
| 41 | HTFMK11 | 143 | 1042907 | BE620294, BE620828, BE503158, AI718991, |
| | | | | AI749303, BE467982, AI707929, BG149952, |
| | | | | BE674357, AI434977, R98920, R98694, |
| | | | | BF511462, AI668979, and N41718. |
| 42 | HTSGQ95 | 52 | 1280458 | BE738386, BE618898, AL537582, AW168786, |
| | | | | AI891062, BE795754, BE378973, BG236152, |
| | | | | AW006340, AI963319, BE675855, AW375108, |
| | | | | AI422309, AL536577, AI832931, AI817124, |
| | | | | BF973736, AI970605, BG248399, Z99384, |
| | | | | BF683882, BF344063, AW955744, BG179903, |
| | | | | BE881482, BE208231, AW874353, BE410944, |
| | | | | BE267254, AI678964, AI884862, BE871137, |
| | | | | BF027496, AI817815, F26345, BE277273, |
| | | | | AA860159, AA989510, AA604546, AW751837, |
| | | | | AA460040, AA808442, AI421161, AI198659, |
| | | | | AW517816, AW951654, AA703967, AI223227, |
| | | | | AA826439, AI300856, AA496882, AW873936, |
| | | | | BF946448, AW663377, N94113, BE733872, |
| | | | | F22350, AW631193, AA134976, AA701063, |
| | | | | AA588881, BE906580, AA668703, W21804, |
| | | | | BE873571, AW751838, BF027022, BE936810, |
| | | | | BF313568, BE790976, AA459951, BE796767, |
| | | | | BE562126, BF313746, BF973015, AI673415, |
| | | | | AI272103, AA046490, AW674626, BF038335, |
| | | | | BE741309, AA622857, BE514642, AI758646, |
| | | | | AI568530, BE899462, BE314645, AA640935, |
| | | | | BG260354, W16885, BE729175, BE834100, |
| | | | | BE728332, AW674570, BE390209, AA323573, |
| | | | | AW583200, BE276360, BE788833, BE734080, |
| | | | | BG116454, BE378551, BF314517, BE394893, |
| | | | | BE615490, BE277837, BE893234, AA035409, |
| | | | | AA046762, AL536597, AA533663, BF830427, |
| | | | | BE733877, BE618501, AW583301, BF344149, |
| | | | | AI242340, BF854794, Z99383, BE298939, |
| | | | | BE894136, BE548866, BF872337, AI564895, |
| | | | | AI244738, F11543, BE958171, BE251364, |
| | | | | AA081138, BE541241, BF700207, AU123424, |
| | | | | AA524604, BE389991, BG033747, BF665573, |
| | | | | BE733288, AA768661, Z28682, BF679554, |
| | | | | BG028665, BF691465, BG164100, BG114670, |
| | | | | AA456812, BE868304, AA405284, BE783231, |
| | | | | AW516939, AI831816, H53662, BE279400, |
| | | | | BG031434, F19326, BE538224, AA035410, |
| | | | | AW512306, BE737929, AA351853, N69293, |
| | | | | AV762220, AU155048, BF526029, AA366435, |
| | | | | AV760360, AL048969, AV684985, BF901147, |
| | | | | BE536927, AU147226, BE155132, AV733378, |
| | | | | AV760760, AV700545, AU145155, AA291651, |
| | | | | AA640277, AV762783, AA224525, BE906160, |
| | | | | BF683250, BE266170, BF185178, AA284247, |
| | | | | U96074, AF092453, AF094850, AF020833, |
| | | | | AC008736, AF134726, AF024533, AC024075, |
| | | | | AC008392, AL109758, AC020904, AJ277546, |
| | | | | AC008569, AC011455, AC004840, AC008649, |
| | | | | AL035587, AC011895, AF064861, AC005837, |
| | | | | AL031597, AC005088, AC008745, AL031283, |
| | | | | AC005338, AC005098, AC004032, AC005695, |
| | | | | AC004966, AC006965, AL138717, AC011479, |
| | | | | AC002476, AC021036, Z84469, AL050349, |
| | | | | AC018758, AC016602, AC004841, AL109825, |
| | | | | AC011484, AC006312, AC005328, Z84480, |
| | | | | AC006014, AC007637, Z85987, AL035685, |
| | | | | AC002365, AC005808, AC018639, AL136087, |
| | | | | AC004824, AF045555, AC006130, AL049749, |
| | | | | AC005859, AC004000, AC004089, U82668, |
| | | | | AC020916, AL033529, AL109976, U95090, |
| | | | | AL136300, AC003684, AC005488, AL136418, |
| | | | | AC018633, AC005089, AP001727, AC005412, |
| | | | | AC004659, AC005529, AJ009611, AC004166, |
| | | | | Z97985, AL035458, AC006211, AL163279, |
| | | | | AP001712, AC006285, AC021016, AL022330, |
| | | | | AC002316, AC007664, AP001719, AC004882, |
| | | | | AC020552, AL109743, AC004253, AC004847, |
| | | | | AC005015, AC084693, AL356379, AC025430, |
| | | | | AC004905, AL031727, AC006330, AC004895, |
| | | | | AL034380, AC007546, AL161670, AL034429, |
| | | | | AL136298, AC005049, AC011248, AC011510, |
| | | | | AL135839, AL355392, AC007216, AC008040, |
| | | | | AC004560, AF111168, AL031186, AC018720, |
| | | | | AC004686, AC004965, AC018751, AL161903, |
| | | | | AC007371, AP000501, AL049576, AL049856, |
| | | | | AC005193, AL136137, AC005305, AC005225, |
| | | | | AC009470, AC004938, AL355094, AL022238, |
| | | | | AL354720, AC005971, AL353748, AL031276, |
| | | | | AL035249, AF196972, AC006023, AC006038, |
| | | | | AC021999, AL445189, AL138976, AC008551, |
| | | | | AC008085, AC006126, AP000033, AL035400, |
| | | | | AL050318, AL080243, AC004605, AC016594, |
| | | | | AC008738, Z95116, AL122020, AP001718, |
| | | | | AL355385, AL135927, AC007227, Z83733, |
| | | | | AC005067, AC011475, AC011465, AL121891, |
| | | | | AL022302, AC005233, L78810, AC004832, |
| | | | | AL020997, AC007298, AL009181, AL034405, |
| | | | | AC020754, AC005081, AC002312, AC015853, |
| | | | | AC011462, AC020908, AC002984, AC009516, |
| | | | | AC000134, AP001711, AC005261, AC009155, |
| | | | | AC004084, AL133353, AC002395, AC008950, |
| | | | | AC007225, AC004985, AC009087, AC010494, |
| | | | | AF205588, AC008623, AL109797, AC004408, |
| | | | | AL445248, AC011490, AC008403, AL136172, |
| | | | | AC002310, Z93023, AC000353, AC006966, |
| | | | | AC004526, AC007011, AC005332, AC004814, |
| | | | | AC004552, AC009032, AL096870, AC002425, |
| | | | | AC002117, AC005274, AL080317, AC005102, |
| | | | | AL049569, AC008848, AC009244, AP001714, |
| | | | | AF030876, AC005154, M89651, AL139123, |
| | | | | AL132772, AC005821, AC003010, AL031685, |
| | | | | AC005527, AC005086, AL139100, AC005486, |
| | | | | AL162578, AC015651, AF030453, AC008805, |
| | | | | AL096814, AC004967, AF215937, AF001549, |
| | | | | AL136419, AP001754, AC005519, AL022476, |
| | | | | U85195, AL033392, and AL121586. |
| 42 | HTSGQ95 | 144 | 1213625 | AL536597, AW583200, AW583301, BG179799, |
| | | | | BF667533, BF701034, AU155048, AU147529, |
| | | | | AI243789, AI560241, AA224525, AI921744, |
| | | | | AA640277, AA081138, AI583532, AU147226, |
| | | | | BF915961, AI340151, AA601336, AA713769, |
| | | | | AI207424, AU147352, AW518140, AA534064, |
| | | | | AI216054, AA486829, AA676462, AW769687, |
| | | | | AA487150, H68343, AA548029, AW833112, |
| | | | | AW188427, BF826830, AU147078, AI889426, |
| | | | | BF805601, AA177013, AV733378, AA551067, |
| | | | | AL118925, N70044, AA158549, W96277, |
| | | | | AA572983, AV732497, AI801505, AI356440, |
| | | | | AA584862, AI800426, BF991881, BF991882, |
| | | | | AW082076, AA468997, BF725844, AU145155, |
| | | | | AA664126, AA491960, AA444166, AA525331, |
| | | | | AW876459, AW973541, AI049504, AW013787, |
| | | | | AI858691, AI709211, BE005805, H93717, |
| | | | | AA666048, BF725884, AW876458, BE245594, |
| | | | | AV762783, AA829044, AA601326, AW962006, |
| | | | | AI797998, AA609826, AW662590, AW662588, |
| | | | | AA652064, AW512300, AA618412, AL079894, |
| | | | | T49451, AW504011, AV691908, AA610255, |
| | | | | BF883766, AV696428, AW502796, AA601674, |
| | | | | AW673267, AI355986, BE005811, AA648957, |
| | | | | AI800706, BE501670, AV763135, AI917132, |
| | | | | AA468494, AI434037, AI805699, AW104163, |
| | | | | AW238341, AA284247, F16848, AA584769, |
| | | | | H54252, AF092453, AC004253, AC008649, |
| | | | | AC005695, AC020908, AL050349, AL049643, |
| | | | | AC004841, AC005527, AC010789, AC004166, |
| | | | | AP000501, AL035400, AC004972, AP001714, |
| | | | | Z99716, AC005821, AC004089, AC005098, |
| | | | | AC005209, AL023807, Z86090, AC027319, |
| | | | | AL137129, AC002425, AC011455, AC005522, |
| | | | | AC005206, AL031293, AC011469, AC005338, |
| | | | | AL160175, AL022324, AC005971, AL022330, |
| | | | | AP001727, AC005015, AC006312, AC005667, |
| | | | | AL135927, AC020552, AC008745, AC005005, |
| | | | | AC004659, AL034380, AC002554, AC008521, |
| | | | | AJ277546, AL158830, AC002394, AC007225, |
| | | | | AC005488, AC005529, AC004895, AC008736, |
| | | | | AF001550, AC004032, AC005808, AC008738, |
| | | | | AL137784, AC073148, AC007227, AL122020, |
| | | | | AL139100, AL109935, AC018738, AC004000, |
| | | | | AL021154, AL161936, AP000215, AC004531, |
| | | | | AL355112, AF190464, AC006511, AC018758, |
| | | | | AC002477, AC006970, AC005332, AP000555, |
| | | | | AC002472, AC007774, AL049840, AL035249, |
| | | | | AC005037, AC008536, U91323, AC002395, |
| | | | | AC010201, AC006285, AC011510, AF134726, |
| | | | | AL034548, AF111167, AC004409, AC010553, |
| | | | | AC005722, AC009783, AL049856, AL163249, |
| | | | | AL445465, AB022785, AC007114, AC006329, |
| | | | | AC008403, AP001752, AC006965, AC008812, |
| | | | | AC011465, AC002389, U95742, AC009060, |
| | | | | AC018642, AC004686, AC005081, AP000704, |
| | | | | AL353777, Z94801, AC011895, AL117334, |
| | | | | AP000116, Z99127, AC007011, AC007216, |
| | | | | AC002365, AF030876, AC006077, AP001760, |
| | | | | AC006199, AC006538, AL157938, AC008760, |
| | | | | AC007436, AL035587, AC006275, AC000025, |
| | | | | AL031723, AC006014, AP001718, AC004953, |
| | | | | AL096701, AC007664, AL096814, AC015651, |
| | | | | AC004858, AC004967, AL162505, AC007546, |
| | | | | AL031005, AC007384, AL138706, AC018639, |
| | | | | AC010473, AC006344, AL136170, AC005049, |
| | | | | AC004156, AC020916, AC006966, AL137162, |
| | | | | AL136137, AC000385, AL132653, AC006061, |
| | | | | AL109976, AC004883, U91321, AC007226, |
| | | | | AF031078, AP001712, AP001631, AL445483, |
| | | | | AP000065, AC015853, AC004552, AL109806, |
| | | | | AC006441, AL031846, AL162615, AC005777, |
| | | | | AC005520, AC005288, AC005754, AL121933, |
| | | | | AC018448, AC011450, AC005694, AC006483, |
| | | | | AL136087, AC005914, AP001725, AL136162, |
| | | | | U52111, AL109963, AP000696, AL157838, |
| | | | | AL033526, AC005844, AC004796, AL138756, |
| | | | | AC006449, AF243527, AL121653, AC006160, |
| | | | | AL121601, AF196779, AC018757, AL080242, |
| | | | | AL031283, AL138787, AC020913, AL096870, |
| | | | | AP000049, AC004821, AL121658, AL121655, |
| | | | | AP001743, AL049776, AP001728, AC023790, |
| | | | | AC008267, AF165926, AL033529, AC004966, |
| | | | | AL049569, AC009470, AC023105, AC007371, |
| | | | | AC024075, AC011506, AC008080, AP001685, |
| | | | | AC011462, AC012627, AL009181, AE000658, |
| | | | | AP000311, AL158141, AL162430, AL034400, |
| | | | | AL117381, AP002085, AC024561, AC005057, |
| | | | | AC005632, AC007298, U91318, AP000269, |
| | | | | AL121891, AC008950, and AC004867. |
| 42 | HTSGQ95 | 145 | 1226328 | BF793601, BE264355, BF059168, AI798238, |
| | | | | BF316651, AI263924, BF514502, AI708865, |
| | | | | T10449, BF855767, AW452145, AI394699, |
| | | | | BF026003, AA485047, N23079, BE017996, |
| | | | | BF591469, AA034518, H53662, N69293, |
| | | | | AA456812, AI086440, AI468360, N89689, |
| | | | | AA626634, AW631193, AI874264, AI300856, |
| | | | | AA405285, AA496882, AA134976, AA588881, |
| | | | | AA640935, AA826439, AI223227, AA860159, |
| | | | | AA405284, AI832931, AA291651, AI817124, |
| | | | | AW006340, F09204, AI673415, AW663377, |
| | | | | AI421161, AW151350, BE208231, AI244738, |
| | | | | AI242340, AI272103, AA622857, AA459951, |
| | | | | AA701063, AI884862, AA668703, AI198659, |
| | | | | AW517816, AA703967, AA808442, AI817815, |
| | | | | AI678964, AA989510, AA533663, AI758646, |
| | | | | BE887237, AI422309, Z99384, BE881482, |
| | | | | AI891062, BE410944, BE378973, BE871137, |
| | | | | BE795754, AI735060, AA046490, BG236152, |
| | | | | AW873936, AW874353, AW168786, AI949213, |
| | | | | F25834, AI970605, AI963319, AA604546, |
| | | | | BF344063, BF027434, F22350, AI564895, |
| | | | | AA035410, W21804, F35777, BE868304, |
| | | | | BE794314, AA768661, F26345, H53623, |
| | | | | AA085037, AW440269, BE407465, AA876546, |
| | | | | AR084814, AF030335, AJ300588, AX001017, |
| | | | | AF092453, AF094850, AF020833, and U96074. |
| 43 | HLSAI43 | 53 | 1243888 | AI658929, AA622809, AC004847, AC003108, |
| | | | | AC006241, AC003010, AC011444, AL163279, |
| | | | | AC005015, AL158040, AC004953, AC005295, |
| | | | | AL031407, AC011895, AL137073, AC008551, |
| | | | | AL096791, AL034420, AC020908, AL353748, |
| | | | | AC008372, AC008403, AC009123, AC005529, |
| | | | | AC005328, AC006509, Z98200, AC007850, |
| | | | | AC010203, AL161731, AC022517, AC005081, |
| | | | | Z94056, AF006752, AC009244, AC002425, |
| | | | | AP001710, AC004089, AL031053, AC005779, |
| | | | | AC011811, AL390738, AL117348, AL445465, |
| | | | | AL136418, AC011462, AL023575, AC005098, |
| | | | | AL049539, AC002477, AC004491, AF053356, |
| | | | | AL031284, AL161670, AC002303, AC022154, |
| | | | | AC005072, AL121890, AC004922, AC020904, |
| | | | | and AC004099. |
| 43 | HLSAI43 | 146 | 1213409 | N55560, AI811076, AA658101, AC004084, |
| | | | | AC005015, AC006241, AL162615, AL137073, |
| | | | | AC007383, AC004847, AL049539, AL135749, |
| | | | | Z98200, AC003950, AL117348, AC004967, |
| | | | | AC011444, AP001759, AL136172, AL035413, |
| | | | | AL049843, AC004032, AL031286, AC008738, |
| | | | | AC004551, AC008521, AC005071, AL031662, |
| | | | | AL161670, AF053356, AL079335, AC007114, |
| | | | | AL137796, AC005902, AP001725, and |
| | | | | AC005624. |
| 44 | HNBTF02 | 54 | 1253163 | AL525808, AL524460, AL525398, AL535552, |
| | | | | AL524461, AL525846, AL535123, AL525223, |
| | | | | BF663201, BF663208, BF969983, BE275108, |
| | | | | BE275895, AV703489, AI151414, BF038378, |
| | | | | BG166785, AI761082, N58441, BG149409, |
| | | | | AI654101, AW339240, AA758040, AW440385, |
| | | | | BE770847, AA677550, AA706893, BF508156, |
| | | | | AW665376, BF530677, AI217787, AI658591, |
| | | | | BF477855, AW152384, AI149742, BE669424, |
| | | | | BE892709, BE349941, AA977493, AA536219, |
| | | | | AW819586, AI376717, AW592564, AI005644, |
| | | | | AA861871, BF593777, AA884111, AA536020, |
| | | | | BF059034, AI559673, BF726489, N51840, |
| | | | | AI052068, BE843155, AI421262, AA865463, |
| | | | | AI984320, AW512183, AA733139, AI884563, |
| | | | | AW964541, AI085891, AI271696, AI095147, |
| | | | | AA479883, AI370924, AI147781, AI539839, |
| | | | | AA877448, AW965502, AW819535, AW607532, |
| | | | | AW152259, AA535765, BF854349, AW193317, |
| | | | | AI880144, AA996022, AI800410, AW662846, |
| | | | | BF223748, AV708490, AA044645, AI767563, |
| | | | | AW958152, AI908462, AA588323, AA613303, |
| | | | | AA938992, AA733206, R53623, AW571973, |
| | | | | R51956, AI203770, AA602626, AW819652, |
| | | | | W86012, AA334937, H44647, N74159, H42033, |
| | | | | AA357168, BF110985, AI267952, AI625183, |
| | | | | AA705824, AA437118, D45504, AA029065, |
| | | | | W86025, AA640325, AW449803, BE789395, |
| | | | | N36557, AW874174, AA428455, R12838, |
| | | | | AA235528, AW393411, AI926618, BE843187, |
| | | | | AA731411, R20748, AA357167, AA626263, |
| | | | | AI560519, AA029169, AW071114, AW005691, |
| | | | | AA042831, BE904532, W04326, N78032, |
| | | | | AI055933, AA971813, AA320463, N54107, |
| | | | | AL535122, AA282332, BF206212, H43605, |
| | | | | BF941832, AA418243, AI125257, AI633736, |
| | | | | W93376, AA902810, AI051856, AA620934, |
| | | | | AI399974, AA418357, AA995833, AI092616, |
| | | | | AW296987, AA811096, AA831648, AA807519, |
| | | | | AI936701, AI288290, AW406569, AW968081, |
| | | | | AA016052, W92480, AI624251, H90778, |
| | | | | AI433364, AA255934, AI364713, AI439493, |
| | | | | AI819639, W94991, BE784330, BF813633, |
| | | | | BF840714, AI865144, BE784703, BF838173, |
| | | | | AK024780, and AC002350. |
| 44 | HNBTF02 | 147 | 1226356 | AL525808, AL524460, AL535552, AL524461, |
| | | | | AL525398, AL525846, AL535123, AL525223, |
| | | | | BF969983, BF663201, BF663208, BE275108, |
| | | | | BE275895, AV703489, BF038378, AI151414, |
| | | | | BG166785, AI761082, N58441, BG149409, |
| | | | | AI654101, AW339240, AA758040, AW440385, |
| | | | | BF530677, BE770847, BF508156, AA677550, |
| | | | | AA706893, AW665376, AI217787, AI658591, |
| | | | | BF477855, AW152384, AI149742, AW964541, |
| | | | | AA536219, BE669424, BE892709, BE349941, |
| | | | | AA977493, AW592564, AW819586, AI376717, |
| | | | | AI005644, BF593777, AA861871, AA536020, |
| | | | | BF726489, AA884111, AI421262, BF059034, |
| | | | | AI559673, AI052068, N51840, BE843155, |
| | | | | AA865463, AW512183, AI984320, AA733139, |
| | | | | AI884563, AI085891, AI271696, AI539839, |
| | | | | AA479883, AI370924, AI095147, AI147781, |
| | | | | AW965502, AA877448, AW819535, AW607532, |
| | | | | AW152259, AA535765, BF854349, AW193317, |
| | | | | AA996022, AI880144, AI800410, AW662846, |
| | | | | BF223748, AV708490, AI767563, AA044645, |
| | | | | AW958152, AI908462, AA588323, AA613303, |
| | | | | AA938992, R53623, AA733206, AW571973, |
| | | | | R51956, AI203770, AA602626, AW819652, |
| | | | | W86012, AA334937, H44647, N74159, H42033, |
| | | | | AA357168, BF110985, AI267952, AA705824, |
| | | | | AI625183, AA437118, D45504, W86025, |
| | | | | AW449803, AA029065, BE789395, AA640325, |
| | | | | N36557, AW874174, AA428455, R12838, |
| | | | | AA235528, AI926618, AW393411, BE843187, |
| | | | | AA731411, AA357167, R20748, AA626263, |
| | | | | AI560519, AA029169, AW071114, BE904532, |
| | | | | AW005691, AA042831, W04326, N78032, |
| | | | | AI055933, AA971813, AA320463, N54107, |
| | | | | AL535122, BF206212, AA282332, AW975618, |
| | | | | H43605, AW964468, AV718489, BF941832, |
| | | | | AA418243, AI125257, AI633736, W93376, |
| | | | | AA902810, AI051856, AA620934, AI399974, |
| | | | | AA418357, AA995833, AI092616, AW296987, |
| | | | | C14331, AA811096, AA831648, AA807519, |
| | | | | AI936701, AI288290, AW406569, AW968081, |
| | | | | AV724520, C14389, AW949630, D59467, |
| | | | | AW973541, AW966030, AV699550, D80024, |
| | | | | D59610, AV718692, AA016052, AW975613, |
| | | | | W92480, AW965158, AW973307, AV722801, |
| | | | | AW973474, D51799, AW978661, D58283, |
| | | | | D80253, AW966053, AW959628, AW959570, |
| | | | | AW966059, AV718931, AV699447, AV718938, |
| | | | | AW978634, AV718633, AW975605, AV720731, |
| | | | | AW959202, D80241, AW959799, AW966029, |
| | | | | AW949657, C15076, AW958993, D80391, |
| | | | | AW960553, AW949645, D59859, D59787, |
| | | | | D80227, AW959062, AI624251, D80166, C14429, |
| | | | | AV719188, AW966065, D51423, D59619, |
| | | | | AW959136, D57483, D80210, D81030, D80240, |
| | | | | AW973488, AV719822, AV719557, AW960465, |
| | | | | AW966075, AV719324, AW973334, AW966531, |
| | | | | AW966534, D80366, AV720211, D80196, D80251, |
| | | | | AV723927, AW949656, AV718707, AW949642, |
| | | | | AV720878, AW966022, AW978648, D80188, |
| | | | | AW964532, AA305409, D80164, D80212, |
| | | | | AW966013, AK024780, AC002350, AR018138, |
| | | | | A84916, AX033851, A62298, AX047063, |
| | | | | AR070327, AJ302649, AX027925, A62300, |
| | | | | AX047064, Y17188, AJ132110, AF058696, |
| | | | | AR008278, AX021518, AX047062, AR087649, |
| | | | | AX035434, X67155, D26022, A25909, AB028859, |
| | | | | AX020191, A67220, D89785, A78862, D34614, |
| | | | | AX028130, AX020190, X82626, D88547, Y12724, |
| | | | | A82595, AR025207, A94995, AJ294956, |
| | | | | AB002449, AR060385, AF260572, AR008443, |
| | | | | A30438, AR074545, AB012117, I50126, I50132, |
| | | | | I50128, I50133, AX015396, AR066488, |
| | | | | AR016514, AR060138, A45456, AJ287395, |
| | | | | A26615, AR052274, Y17187, A85396, AR074141, |
| | | | | AR066482, A44171, AR088705, AX042372, |
| | | | | A85477, AR008277, AR008281, I19525, A86792, |
| | | | | AR074139, A43192, A43190, Y09669, AR038669, |
| | | | | AR066487, AR074136, X93549, X68127, |
| | | | | AR066490, D88507, I14842, AR054175, I18367, |
| | | | | D50010, U46128, AR016691, AR016690, |
| | | | | AR093385, A63261, AR071754, AR008408, |
| | | | | AR091537, AR062872, A70867, U79457, D13509, |
| | | | | A64136, A68321, AR060133, I79511, AF135125, |
| | | | | AR092424, AX035429, AX035428, AX035426, |
| | | | | AF123263, AB023656, AR032065, AB033111, |
| | | | | X93535, and AR008382. |
| 45 | HNSCC06 | 55 | 1263307 | BE409588, BE734445, BE901407, BF025948, |
| | | | | BE614952, BE743554, AU125993, BE390314, |
| | | | | BE256957, BE253147, BE258154, BE274147, |
| | | | | AI192958, BE389838, BE537850, BE387783, |
| | | | | BE390536, BE256422, BE258334, BE409102, |
| | | | | BF795226, BE391787, BE543286, BE408304, |
| | | | | BE733067, W39709, BE251706, BE292966, |
| | | | | AW851119, BE278959, BE616308, W15487, |
| | | | | AW939056, AA749428, BF795480, BE788770, |
| | | | | AW977047, AI222705, R77439, BG117241, |
| | | | | AI765573, BE279318, BF351247, AW880061, |
| | | | | AL048927, BF351250, W52823, AA721368, |
| | | | | AA804780, AA643419, AA179683, AK022749, |
| | | | | AL078645, Z97985, AL109952, AL133275, |
| | | | | AL121675, AC007955, U72787, AC006222, |
| | | | | AC004621, AC011493, AC010422, AL035666, |
| | | | | AL109801, AL117380, AC002350, AC004823, |
| | | | | AL136305, AL096773, D42052, AL034376, |
| | | | | AL359649, AL078639, and AL157361. |
| 45 | HNSCC06 | 148 | 1209025 | BE734445, AU125993, BF795226, BE253147, |
| | | | | BE258334, BE733067, BE256957, BE292966, |
| | | | | BE278959, AW851119, BE616308, AW939056, |
| | | | | BF795480, BE256422, BE788770, BE409102, |
| | | | | BE251706, BE389838, BE390536, BE279318, |
| | | | | BE743554, BF025948, BE390314, BE391787, |
| | | | | BE409588, BE387783, BE258154, BE274147, |
| | | | | AI765573, BE408304, BE901407, AL048927, |
| | | | | BE614952, AK022749, AL109952, AL133275, |
| | | | | and Z97985. |
| 47 | HCNCM78 | 57 | 1243864 | AA553959, AW134688, AI831407, BE899580, |
| | | | | AW516596, AW206923, AI948903, AI983767, |
| | | | | AI339648, AI832391, AI833297, AA587764, |
| | | | | BF001316, AI283185, AI304380, AI813445, |
| | | | | AA857922, AI336470, AA938765, AI832498, |
| | | | | AW970357, AI833021, AI285352, AW854263, |
| | | | | AW970275, AI744428, AI336626, AW591238, |
| | | | | AI732376, AI732377, AA534511, AI864896, |
| | | | | AA422086, AW361498, AW361500, AW361502, |
| | | | | AI766378, AA422178, AI833288, AI246768, |
| | | | | AW351854, BF478262, AA535314, AW361503, |
| | | | | AA283751, AW351839, AI720988, T25111, |
| | | | | AX027767, AX027773, and AK025416. |
| 47 | HCNCM78 | 150 | 1225879 | AA553959, BE899580, AW516596, AI948903, |
| | | | | AI983767, AI831407, AI832391, AI833297, |
| | | | | AW134688, AA587764, BF001316, AI304380, |
| | | | | AI283185, AI813445, AA857922, AI336470, |
| | | | | AA938765, AI832498, AW970357, AI339648, |
| | | | | AI833021, AW206923, AW854263, AI285352, |
| | | | | AW970275, AI744428, AI336626, AW591238, |
| | | | | AI732376, AI732377, AA534511, AI864896, |
| | | | | AA422086, AW361500, AW361498, AW361502, |
| | | | | AI766378, AA422178, AI833288, AI246768, |
| | | | | AW351854, BF478262, AA535314, AW361503, |
| | | | | AA283751, AW351839, AI720988, T25111, |
| | | | | AX027767, AX027773, and AK025416. |
| 47 | HCNCM78 | 151 | 1225880 | BE899580, AW134688, AA422178, AW854263, |
| | | | | AA553959, AI831407, AW516596, AI304380, |
| | | | | AI983767, BF001316, AI948903, AI832391, |
| | | | | AW206923, AI833297, AI339648, AA587764, |
| | | | | AI283185, AI813445, AI832498, AA857922, |
| | | | | AI336470, AA938765, AW970357, AW361498, |
| | | | | AW361500, AI833021, AI285352, AW361502, |
| | | | | AW970275, AI744428, AI336626, AW591238, |
| | | | | AI732376, AI732377, AA534511, AI864896, |
| | | | | AA422086, AW351839, AI766378, AA283751, |
| | | | | AI833288, AI246768, AW351854, BF478262, |
| | | | | AW361503, AA535314, AI720988, T25111, |
| | | | | AL042488, AL046356, AL045891, AL043321, |
| | | | | AI432666, AL041862, AL040207, AI432644, |
| | | | | AL043089, AL042787, AW877209, AI431307, |
| | | | | AI538850, AL135012, AL047675, AI431316, |
| | | | | AI690946, BG252929, BE897632, AW858522, |
| | | | | BE885490, AI539781, AI866786, AI494201, |
| | | | | AW151136, AI539771, AI537677, AI500659, |
| | | | | AI815232, AI801325, AI500523, AI889147, |
| | | | | AI582932, AI284517, AI923989, AI500706, |
| | | | | AI445237, AI491776, AW151138, AI521560, |
| | | | | AI889189, AI500662, AI284509, AI889168, |
| | | | | AI866573, AL042515, AI633493, AI866465, |
| | | | | AI434256, AI805769, AI888661, AI284513, |
| | | | | AI888118, AI872423, AI440252, AW172723, |
| | | | | AI440263, AL042898, AI866469, AI434242, |
| | | | | AI436429, AI859991, AI355779, AI371228, |
| | | | | AI610557, AI860003, AI242736, AI887499, |
| | | | | BE886728, AL042853, AI890907, AI433157, |
| | | | | AI432656, BG029667, AL042655, AI521596, |
| | | | | AL047163, AL047092, AL047611, AL043091, |
| | | | | AL042729, BG110517, AL515375, AI559957, |
| | | | | AI828574, BG257535, AI866510, BG251257, |
| | | | | BF795712, AI371251, AI539800, AI539260, |
| | | | | AI923046, AL042744, AI581033, AI538885, |
| | | | | AI431238, AL045620, AI500714, AI491710, |
| | | | | AI521571, AI648567, AL042365, AI539707, |
| | | | | BG113712, BF727352, AI355008, BF968504, |
| | | | | AI887775, AI590043, BF797072, BF338002, |
| | | | | BE883591, AL042508, BG180295, BG181066, |
| | | | | BG259587, AL042802, BG179586, BG111590, |
| | | | | BF968622, BG114012, AI431321, BG260287, |
| | | | | BG165260, BE895801, AI275175, BG164752, |
| | | | | BG033403, BG034554, BG029194, BF983875, |
| | | | | BG180046, BF528717, AW089557, AI366900, |
| | | | | BG024457, AL045500, AI432653, BG261116, |
| | | | | AI623302, AW197139, BF968984, BG178146, |
| | | | | AL042551, BF347093, BG257383, AL042533, |
| | | | | BG030750, BG181100, BG116926, BG166490, |
| | | | | BG122277, AI499463, AL046990, AI610362, |
| | | | | AL515373, AI440239, AV739574, AI537273, |
| | | | | AI537191, AI436456, BF965814, AI963846, |
| | | | | AI567940, AL042931, AI817244, AI612913, |
| | | | | AI285826, AI863014, AI521594, AI499512, |
| | | | | AI889133, AI582912, AI371265, AI866461, |
| | | | | AI610357, AI434223, AI610429, AI433968, |
| | | | | AI623736, AX027767, AX027773, AK025416, |
| | | | | AL133049, AL133074, AL133053, AL122101, |
| | | | | AB018705, AL133076, AX030435, and Y17793. |
| 48 | HCOKD57 | 58 | 1271607 | AL514084, BF980786, BF000075, AI796517, |
| | | | | AW070690, BG116779, AV729125, AL040719, |
| | | | | BE905371, BF435812, AV758811, BF445032, |
| | | | | BF038933, AU139160, BE817698, BE817689, |
| | | | | BE817692, BF970673, BE817688, BE817690, |
| | | | | BF980976, BE817683, BE219133, AW576078, |
| | | | | AI492014, BF695375, AW341259, AW137190, |
| | | | | BE739011, AA770505, BF436062, AW044212, |
| | | | | BE829282, BE817686, BE930822, AW015617, |
| | | | | BE905281, BE817687, AA460440, AV746720, |
| | | | | AW515269, BE829316, BE770749, BF331445, |
| | | | | BF667893, AI700452, BE817622, BF197030, |
| | | | | AW050703, AI907066, N67813, BE829313, |
| | | | | BE817504, BE167598, BG249234, BE167595, |
| | | | | BF512427, AA720628, H27396, AW293068, |
| | | | | AI458960, BE817627, H99488, BF983519, |
| | | | | AW237464, AW516111, BE172367, BE817507, |
| | | | | BE817447, BE817445, BE817440, AV748223, |
| | | | | BF692864, BE872440, AV749079, AA573324, |
| | | | | BE817623, BF329441, AA361602, BF329419, |
| | | | | AA299162, BE770731, AW583451, BF329407, |
| | | | | N56603, AI474862, BE817439, AA384824, |
| | | | | D31551, BF342070, BF814761, BG166654, |
| | | | | BE538997, AI469516, BF924856, BG255903, |
| | | | | BF811808, AI445620, BF032768, BF726183, |
| | | | | AI927233, BE967219, BF751997, AW827144, |
| | | | | AV727264, AW160363, BF921291, AL079741, |
| | | | | AI523806, AF263279, E07890, D14043, AJ238574, |
| | | | | AF106518, AB028895, AB014464, AL117583, |
| | | | | AF130099, AF130104, AL162085, AF217987, |
| | | | | AX019230, I89947, AL110280, AF116631, I33392, |
| | | | | AK026452, AX019229, AK026600, Y10080, |
| | | | | X82434, AF112208, U35846, I48978, AK024992, |
| | | | | AL137478, AL359596, AF177401, AF227198, |
| | | | | AL133112, Y16645, AL133080, AL133067, |
| | | | | AJ000937, A08913, AL050092, AL117432, |
| | | | | AR038854, AK000137, U96683, A12297, A08910, |
| | | | | A08909, AK026057, AL117626, AF118090, |
| | | | | AF130077, AL389935, AL133560, AL359600, |
| | | | | AL137459, AK027164, AL117460, A08916, |
| | | | | A08912, AL050108, AB034701, A08911, A58524, |
| | | | | A58523, AL389939, AF111112, Y10655, |
| | | | | AF119875, AK026480, AL353957, A93350, |
| | | | | AX010492, AK024533, AJ238278, AB050431, |
| | | | | AK024855, L31396, L31397, S76508, A08908, |
| | | | | AK026583, AL390154, AK000083, AF125948, |
| | | | | AL133606, AK026647, AK026624, AF090900, |
| | | | | I89931, AL122049, AL137526, AB048913, |
| | | | | AL050146, AX006092, AK025465, E01614, |
| | | | | E13364, AX026824, AR087170, AL162002, |
| | | | | AF078844, AF113690, AX026823, AK000445, |
| | | | | AK025524, I09499, AK026434, AL137292, |
| | | | | AK026542, AF116691, AK024524, AF218014, |
| | | | | AK026642, AF119871, AL110197, AL137648, |
| | | | | AF155221, AF116646, U87620, AL050116, |
| | | | | AX046842, AF178432, AF130110, AK026534, |
| | | | | AF067790, A08907, AK027105, S63521, |
| | | | | AL133054, U92068, AK025860, AL080074, |
| | | | | AK025084, AK025414, AK000212, AK025119, |
| | | | | AL157479, AL080127, A07647, AF039137, |
| | | | | AL442082, AF090901, AL122093, AL117435, |
| | | | | AL137521, AF114168, AR011880, AF113691, |
| | | | | AF130059, AF091084, AK024538, AF113019, |
| | | | | X66871, AK025967, AF126488, AB052191, |
| | | | | AF130075, AL050149, AK026855, AL137480, |
| | | | | AF106862, I29004, X66417, I00734, A18777, |
| | | | | AL122110, AF113694, AF097996, AJ299431, |
| | | | | AL133640, AK026045, AL137271, AL049314, |
| | | | | AL442083, AK025407, AF119860, AF026124, |
| | | | | AL133075, Y14314, AK025312, AR079032, |
| | | | | E00617, E00717, E00778, X66975, AL355701, |
| | | | | I68732, X72889, AF130087, AK026532, |
| | | | | AF039138, AL137557, AK026528, AL122050, |
| | | | | AF087943, L40363, AK025339, AF110640, |
| | | | | AK026762, I17767, AL162006, AF116602, I03321, |
| | | | | AX020124, AK026927, S77771, AF125949, |
| | | | | AF130082, AF260566, AK000323, AL049347, |
| | | | | AL122118, AF090896, S79832, AL133049, |
| | | | | E02221, AF022363, X98834, U88966, AL080124, |
| | | | | AB049892, AL049464, AJ001838, AK027114, |
| | | | | Y10823, AF119899, AF130055, AF106827, |
| | | | | AL122111, AK027213, AL137538, AK026630, |
| | | | | J05032, AX027129, AR034821, X83508, |
| | | | | AC009501, AK026408, AF126247, AK024588, |
| | | | | AB041801, AF130054, Z72491, AK027193, |
| | | | | AX040974, AF111849, A91160, AL359623, |
| | | | | AB052200, AF262032, AL049452, AL353940, and |
| | | | | AF185576. |
| 49 | HRAEO74 | 59 | 1209635 | AW857559, AW860551, AI697075, and |
| | | | | AK026923. |
| 50 | HTACM88 | 60 | 1253076 | AI288755, AI828190, AI991170, AL525210, |
| | | | | AA401831, AI820010, BG236281, AW080971, |
| | | | | AA436421, AI183760, AA436436, AA427933, |
| | | | | AA454879, AA929056, AI291005, AI709125, |
| | | | | AI143034, BF736997, AW181949, AA887997, |
| | | | | AI087367, AW392589, W49706, AV649907, |
| | | | | AA613359, AI343895, AA564472, AI167351, |
| | | | | AI128933, BG178655, BE876180, AA994804, |
| | | | | BF743783, AI751316, AW130234, AA643538, |
| | | | | AA481379, AW351505, R38636, AW004764, |
| | | | | W48634, AA962531, AW203997, W49705, |
| | | | | W48837, AA455222, BF375473, AA740790, |
| | | | | AV736280, BE813536, AI572675, C06035, |
| | | | | AA443505, AA911262, BE348886, AA962734, |
| | | | | AV740202, AA291454, AA379425, BE812218, |
| | | | | BE812373, AA379455, D20213, AI476379, |
| | | | | AI288154, F11072, F01677, T29574, AI640860, |
| | | | | AI922805, AI924885, AI940499, BF917486, |
| | | | | AV761762, AA481366, AA373077, AA158190, |
| | | | | AW338370, W19208, AI354847, AV760723, |
| | | | | AA613624, AA749158, BE538860, AL120343, |
| | | | | AC006953, M83246, A18757, I08456, U08839, |
| | | | | X51675, U09937, I08455, AF302071, AL354864, |
| | | | | AC018719, AF302073, AC005056, AL137145, |
| | | | | AC020904, AC004867, AL157838, AC004033, |
| | | | | AC008738, AC004134, AC011484, AC004882, |
| | | | | Z95113, AC004099, AL109743, Z97054, |
| | | | | AL022330, AC003010, AP000152, AC005102, |
| | | | | AC005529, AC068799, AL121933, AL031737, |
| | | | | U91321, AP001728, L78833, AC005488, |
| | | | | AC011559, AC008569, AC005740, AC004089, |
| | | | | AC004000, AC004032, AL135783, AC008119, |
| | | | | AC002300, AC011444, AC010412, AF030453, |
| | | | | AC005071, AC004826, AC011450, AC005484, |
| | | | | AC002287, AC008403, AF243527, U95742, |
| | | | | AP001695, AL033527, AC020917, AL121897, |
| | | | | AC004876, AC002312, AL136300, AC000353, |
| | | | | AC007722, AL022316, AL109976, AC005088, |
| | | | | AC008115, AC004166, AL354720, AL049840, |
| | | | | AC007597, AP000501, AC005933, AC011473, |
| | | | | AC009123, AL355392, AL034423, Z84466, |
| | | | | AC010206, AL031283, AC002126, AL049872, |
| | | | | AC007216, AC002477, AC008395, U91323, |
| | | | | AL022320, AC002350, AC021016, AC020916, |
| | | | | AL109984, AC011490, Z85987, AC007225, |
| | | | | AL162615, AC011465, AF302072, Z95152, |
| | | | | AC005821, AC004953, AC002425, AC004983, |
| | | | | AP001727, AC009228, AC027319, AC005399, |
| | | | | AC003982, AC008474, AL035683, AC003070, |
| | | | | AC011462, AC006967, AL355385, AC010553, |
| | | | | AC068499, AC005231, AL034429, AL096814, |
| | | | | AC004019, AL136305, AC004985, AC000379, |
| | | | | AC011489, AC006262, AL139286, AC005726, |
| | | | | AC006452, AL109797, AL139100, AC000052, |
| | | | | AC007308, AC005514, AF196969, AC007637, |
| | | | | AL158040, AC004832, AC004883, AC000159, |
| | | | | AC005412, AL021154, AC005180, AL161449, |
| | | | | AC011449, AL021453, AC007676, AL009181, |
| | | | | AF001550, AC005940, AF196779, AP001660, |
| | | | | AC011455, AC005519, AC018644, AC006312, |
| | | | | AL049779, AC004659, AC007057, AC022148, |
| | | | | AC009509, AL138756, AC006057, AL133551, |
| | | | | AL008726, AL022322, Z84469, AC006449, |
| | | | | AC005969, AC004966, AC004223, AC006014, |
| | | | | AL096701, U95740, AC004840, AC010311, |
| | | | | AC004878, AC007957, AC025593, AC010285, |
| | | | | AC007371, AC006441, AC012384, AC005057, |
| | | | | AL161936, AL133245, AL022334, AC020947, |
| | | | | AL050307, AC024082, AC002400, AC010789, |
| | | | | AP000692, AC024075, AC005520, AL022323, |
| | | | | Z83844, AC007201, AC005531, AC004167, |
| | | | | AL050318, AF196970, AP001716, Z93015, |
| | | | | AC011442, AC006530, AC004815, AC009086, |
| | | | | AC004031, AC005052, U07562, AC004104, |
| | | | | AC009016, AL021707, AL163249, AF196972, |
| | | | | AL133396, AC004491, AC005800, AC005932, |
| | | | | AC004887, AC007375, AC003963, AL035681, |
| | | | | AL121586, AL023284, AL132639, AC007731, |
| | | | | AL133382, AL117258, AP000347, AC009155, |
| | | | | AC004382, AC002470, AL136218, AL133153, |
| | | | | AL137073, AL161781, AC005920, AL031727, |
| | | | | Z92542, AC010618, AC004150, and AL050349. |
| 50 | HTACM88 | 153 | 1213431 | AA621838, AI354847, BF768331, AA370455, |
| | | | | AA773302, BE222564, AV731189, AU119532, |
| | | | | BE740358, BE160473, AU117926, H12383, |
| | | | | BF764092, BE731600, AV714931, BE867712, |
| | | | | BE538259, BE541237, BG260565, AI537772, |
| | | | | AA570230, AW405593, AV763305, AA594043, |
| | | | | BF106319, AW817889, BF832641, AU144517, |
| | | | | AV660988, BF792316, AI311234, AA605272, |
| | | | | AC006953, AL137145, AC008041, AC009509, |
| | | | | AC005546, AL445532, AC008958, AC004887, |
| | | | | AL031390, Z97054, AC004166, AC005920, |
| | | | | AP001437, AC005080, AC007707, AP000152, |
| | | | | AP000011, AC007216, AC010598, AF030453, |
| | | | | AC005088, AC009247, AL021546, Z98750, |
| | | | | AC005520, AC008651, AC011455, AC006544, |
| | | | | AC008753, AC006120, AC005031, AC008055, |
| | | | | AL163249, AC004686, AL133215, AL358777, |
| | | | | AC005821, AC002563, AC010422, AC007957, |
| | | | | AC003104, AL031228, AP000208, AP001728, |
| | | | | AL121933, AC006543, AL031311, AP001714, |
| | | | | U80017, AL390039, AC068499, AC012384, |
| | | | | AC004590, AC004655, AC073148, AC027319, |
| | | | | AL035684, AP001710, AC078899, AC005391, |
| | | | | AP000512, AC005919, AL022476, AC007050, |
| | | | | AC009312, AC005669, AC005940, AC004965, |
| | | | | AJ229041, AC004126, AC005668, AC011510, |
| | | | | AL139286, AP001711, AC006483, AC002126, |
| | | | | AL356422, AL445215, AL080243, AF070718, |
| | | | | AC007597, AL163280, AL133232, AC025593, |
| | | | | AC005098, AL355392, AC005522, AL354864, |
| | | | | U85195, AL031005, AP000247, Z97056, Z95152, |
| | | | | AC005839, AC002080, AF196779, AC009506, |
| | | | | AL109897, AL031295, AE000658, AC004878, |
| | | | | AB003151, AL049779, AL138717, AL050349, |
| | | | | AC006505, Z93023, AC011445, AC006329, |
| | | | | Z84469, Z98884, Z83840, AC007240, AC004079, |
| | | | | AC010206, AC006581, AC008119, AC007052, |
| | | | | AF169120, AP000133, AP000211, AC006312, |
| | | | | AL136529, AL008726, AC006013, AC005000, |
| | | | | AL136139, AC007201, AL121601, AL031681, |
| | | | | AL132777, AC011442, AC008012, AC022148, |
| | | | | AC002480, AL109976, AC008403, AC022816, |
| | | | | AC011444, AC007225, AC010150, AC007881, |
| | | | | AL109654, AC007731, AC008969, AC011811, |
| | | | | AC002565, AP000355, AL022326, AC005921, |
| | | | | AC007298, AP001716, AC005808, AC006451, |
| | | | | AL034420, AB015355, AC006948, AC007880, |
| | | | | AC021999, AC006597, AC005071, AL022163, |
| | | | | AL079341, AC004659, AC020754, AL390374, |
| | | | | AC015541, AC026162, AC006530, AL137129, |
| | | | | AL117258, AC010271, U95742, AL022322, |
| | | | | AL121652, AC007620, AL133163, AC004149, |
| | | | | AL121653, AC008567, AC000353, AC002470, |
| | | | | AC018719, AC003670, AL031662, U91321, |
| | | | | AL132639, AC005369, AC006479, AC010077, |
| | | | | AP000555, AL049796, AF196969, AC002395, |
| | | | | AL122001, AC021016, AC005548, AC005971, |
| | | | | AL109614, AC009032, AL136228, AC008569, |
| | | | | AL135927, AC007227, AC007842, AL109797, |
| | | | | AL136300, AL121916, AC009086, AC020626, |
| | | | | AF011889, AC006449, AC005102, AC018644, |
| | | | | AF196970, AL096814, AC008124, AL355916, |
| | | | | AC004840, AL139353, AL050318, AC018797, |
| | | | | AL022237, AC004491, AC002554, AC006349, |
| | | | | AC007676, AC018758, AC018764, AC004033, |
| | | | | AC008267, AL157838, AC008372, AP000167, |
| | | | | AL160175, AL161670, AL138721, and |
| | | | | AC000029. |
| 50 | HTACM88 | 154 | 1228352 | AI288755, AI828190, AI991170, AA401831, |
| | | | | AI820010, AL525210, BG236281, AA436421, |
| | | | | AI183760, AW080971, AA436436, AA929056, |
| | | | | AA613359, AA454879, AA427933, AI291005, |
| | | | | AI709125, AI128933, W49706, AA564472, |
| | | | | AA994804, AI143034, AW181949, AA887997, |
| | | | | AI087367, BF736997, AV649907, AI343895, |
| | | | | AW392589, BG178655, AA643538, AI167351, |
| | | | | AI751316, BF743783, R38636, AW130234, |
| | | | | BE876180, W48634, AA481379, W49705, |
| | | | | AW203997, AA962531, W48837, AW351505, |
| | | | | AV736280, AA455222, AA740790, AW004764, |
| | | | | BF375473, BE813536, AA911262, C06035, |
| | | | | AI572675, AA962734, AV740202, BE348886, |
| | | | | AA443505, AI476379, D20213, AI288154, |
| | | | | AA379425, F11072, BE812373, AA379455, |
| | | | | AA291454, F01677, BE812218, T29574, |
| | | | | AI640860, AI924885, AI940499, AA373077, |
| | | | | W19208, AA632207, AA481366, AI249275, |
| | | | | AI570820, AI167352, BE813549, AW994048, |
| | | | | AW363436, BF245165, BE812378, AW136371, |
| | | | | BF433323, AW604072, AI640645, AI738692, |
| | | | | BG231592, AW949939, AI128941, AW338725, |
| | | | | BE707831, BE881636, AA148025, AI471385, |
| | | | | AI801128, AI478377, AW363441, BF767408, |
| | | | | AV654244, M83246, AI8757, I08456, AC006953, |
| | | | | X51675, U08839, U09937, I08455, AF302071, |
| | | | | AF302073, AF302072, AF230359, AF257789, |
| | | | | AF302074, U09936, X74039, I08454, and U09346. |
| 51 | HBWBI44 | 61 | 1277904 | AI279064, BF808316, BE502286, BG035106, |
| | | | | AL525085, AI002918, AI655677, AI979295, |
| | | | | AI954725, and AI335935. |
| 51 | HBWBI44 | 155 | 1159379 | AI279064, AI002918, AI658541, AA465689, |
| | | | | AP001207, AC012442, AC004084, AC011811, |
| | | | | AC005940, AC004166, AL121895, AL136097, |
| | | | | AC009244, AC005098, AC002544, AL022320, |
| | | | | AC005622, AL356299, AC006597, AL121896, |
| | | | | AL022318, AC004671, AC008750, AC004773, |
| | | | | and AC005088. |
| 52 | HAGIF61 | 62 | 1243855 | BE615911, AW024250, AA581416, AI798859, |
| | | | | AI672399, AI830617, BE219023, AW024261, |
| | | | | AI634552, AI678830, AA581434, BE675723, |
| | | | | AI475894, AA836318, AI910508, BG149711, |
| | | | | AI863379, AI357862, AI684341, AI687339, |
| | | | | BF739932, BE466788, AW470389, AW662349, |
| | | | | AW771538, W73842, AI859548, AI083937, |
| | | | | AA614816, W69198, AI206255, W58108, |
| | | | | BE502786, AA724515, BG168364, H97677, |
| | | | | W69302, AI358221, AI830503, AI540802, |
| | | | | AV714000, W58218, BF062532, AW192131, |
| | | | | BE048082, BF528443, AA224329, H43162, |
| | | | | T48025, AI380494, BG055888, AI380493, |
| | | | | W69716, T23426, T23472, AA330730, AI586967, |
| | | | | AA563998, F24016, AI689522, BF903224, |
| | | | | AA788627, AI524127, AA917403, C02041, |
| | | | | BE073275, AA308402, AW627500, BF738768, |
| | | | | BF528665, AA890558, AA304909, H43098, |
| | | | | W73698, AL390127, and AC025614. |
| 52 | HAGIF61 | 156 | 1212943 | BE615911, BF348047, BF528443, BG168364, |
| | | | | BF797908, BF528665, AV714000, AW850752, |
| | | | | AW850753, BF311989, BF314844, AW024250, |
| | | | | AI672399, AA581416, AI798859, BE219023, |
| | | | | AI830617, AW024261, AI634552, AI678830, |
| | | | | BE675723, BF206966, BE048082, BF062532, |
| | | | | AI475894, AA581434, AA836318, AI910508, |
| | | | | BG149711, AI863379, AI357862, AI684341, |
| | | | | AI687339, BF739932, BE466788, AW470389, |
| | | | | AW662349, AW771538, AI206255, W73842, |
| | | | | AI830503, AI083937, AI859548, AA614816, |
| | | | | W69198, BE502786, AA724515, H97677, |
| | | | | AI358221, W69302, W58108, AA308402, |
| | | | | BF903224, AI540802, AW192131, AA304909, |
| | | | | W58218, W69716, AA224329, BF346644, H43162, |
| | | | | AI380494, BG055888, AI380493, AA351550, |
| | | | | BF738768, T48025, T23426, T23472, AA330730, |
| | | | | AI586967, AW747892, AA563998, F24016, |
| | | | | BF349796, AI689522, AA224075, AA788627, |
| | | | | AI524127, AA917403, C02041, BE313633, |
| | | | | BE073275, AW627500, AA223797, BF903213, |
| | | | | AA890558, T48069, H43098, BF738021, W73698, |
| | | | | AW956295, AW964422, AV658863, AW959868, |
| | | | | AV692345, AV659536, AV706827, AV708704, |
| | | | | AV704771, AV703819, AV727015, AV706342, |
| | | | | AW964369, AW957428, AL390127, and |
| | | | | AC025614. |
| 53 | HSYHD12 | 63 | 1280343 | AL520080, AL532356, AL520079, AL527585, |
| | | | | AL527586, AL526894, AV684581, AL526753, |
| | | | | BE543419, AA233105, AI061464, AW000960, |
| | | | | AA182932, W01643, N45263, N39195, AI700982, |
| | | | | AA181583, AI493417, AA626568, AI735156, |
| | | | | AI470553, AA704923, AI342329, AI763138, |
| | | | | AA621175, AI382784, BE008953, AA977119, |
| | | | | N71629, AW196544, BE778807, AV748461, |
| | | | | AV682395, AW051088, BG166654, AI620302, |
| | | | | AI364639, AI284484, AI619607, AW983829, |
| | | | | AI698391, BG105501, AW149925, AI285735, |
| | | | | AI978703, BG164558, AI590043, AI270183, |
| | | | | BG179993, BF812960, AL121365, AI624293, |
| | | | | AL119863, AI625926, BF814450, AL039390, |
| | | | | AL514879, AI537677, AI678480, AW020397, |
| | | | | AW057937, AW983832, BF970768, AI345688, |
| | | | | AI287704, AI554821, AI635067, AL046944, |
| | | | | BF107577, BE047852, AI688858, AI932503, |
| | | | | AI866127, AI475371, AW083572, AI471909, |
| | | | | AI582932, BF033757, AI536685, AL036150, |
| | | | | AI866469, BG256090, BF856052, AA464646, |
| | | | | AA848053, BF726255, AV682488, AW827290, |
| | | | | AW150826, BG108406, AI473536, BG033509, |
| | | | | AV682366, BG029218, AL513755, AL514871, |
| | | | | BE045182, BG027679, BF032868, BG257535, |
| | | | | AL079963, AL037454, BG110684, AI654276, |
| | | | | BF970652, BG113385, AW169604, AI800464, |
| | | | | AI632997, AL110306, AI335214, AI961589, |
| | | | | AI929108, AI918435, BE965621, AV721325, |
| | | | | AI802542, AW089275, AW198112, AW087445, |
| | | | | AI866090, BF868489, AI955117, AI583558, |
| | | | | BF814449, BF814357, AV755821, BE965599, |
| | | | | AI499963, AI597758, AW129659, AW080746, |
| | | | | AI587279, AI636456, AI446538, AI538850, |
| | | | | BE967307, AI355779, AI800341, AI866770, |
| | | | | AV733397, BG260287, AI866465, AI923370, |
| | | | | AI612913, AI868931, BF812938, BF791952, |
| | | | | BF752245, BG029053, BG029667, BF039003, |
| | | | | AI818353, BF814527, AI632408, AI494201, |
| | | | | AW105087, AI521560, AI433157, AI802654, |
| | | | | AI920835, AI702073, AW163464, AW263796, |
| | | | | AI539808, BG249582, AI627988, BF812961, |
| | | | | AW827289, BE965129, BG109270, BG113299, |
| | | | | AW262552, AI281757, AI950877, BF751288, |
| | | | | AI669864, AL514627, AL513901, AI860897, |
| | | | | AI623941, BF904259, AI668893, AL515191, |
| | | | | AI633125, AI832245, AI439762, AI619748, |
| | | | | AI891084, AI538564, AW058243, AI687168, |
| | | | | AI872910, AI915291, AW152182, AI358701, |
| | | | | BF038002, BE910373, AI537273, AW189301, |
| | | | | AI670009, BE811804, AI889189, AV716358, |
| | | | | AI621341, AI475806, BF340323, AW026882, |
| | | | | AI434656, BE962857, BG112718, AI819014, |
| | | | | AL046466, AA279293, BG029532, AW023338, |
| | | | | AI884318, AV729649, AV682272, AV705644, |
| | | | | AW079075, AI625094, AV682529, BG180996, |
| | | | | AI679266, BF904265, BF925729, W74529, |
| | | | | AI277008, BF921291, AI687166, AL045774, |
| | | | | AI589428, BE047606, BF792740, BE878014, |
| | | | | AI890223, AI872804, AI241923, BG252914, |
| | | | | BE393784, BF970295, AL046942, AI564247, |
| | | | | AL036638, AV659322, BE885241, AJ404004, |
| | | | | Z59762, AF119899, A77033, A77035, AL353956, |
| | | | | I89947, AL389935, AF090900, AB050431, |
| | | | | AF113019, X79812, AF069506, AF177401, |
| | | | | AF130110, AF113699, AF106657, AK027146, |
| | | | | U35846, AK027096, AR038854, I48978, E06743, |
| | | | | AL110280, AF130055, AK000083, AK027164, |
| | | | | AF104032, AL049300, S36676, A65340, I33392, |
| | | | | AF111849, AK026506, AF116646, AL137558, |
| | | | | AL050092, AL122110, X70685, AB047904, |
| | | | | AF119865, AL137533, AK026462, AL133560, |
| | | | | AF130104, U58996, AL133080, AF116602, |
| | | | | A65341, AF119859, AK025209, AB046642, |
| | | | | AF026124, AL080126, A08910, AF026816, |
| | | | | AK026533, AK024588, A08909, AL049283, |
| | | | | AK026583, AL137459, AL137529, A08913, |
| | | | | AL080140, AL050155, AL133113, AL117435, |
| | | | | AF057300, Z97214, AF057299, AF078844, |
| | | | | Y16645, AL133558, AF119909, A08912, |
| | | | | AL137480, AK024538, AK026057, AL133640, |
| | | | | AL162006, AK025435, U87620, S69510, |
| | | | | AK027142, AL023657, AF130082, AF116631, |
| | | | | AF113694, AB052191, AK026746, A08916, |
| | | | | AL049382, AK000391, AL117416, AF031147, |
| | | | | AL096720, A52563, I32738, AF106862, |
| | | | | AL122050, AJ000937, AK025084, AF254119, |
| | | | | X65873, AR011880, AK026647, S78453, |
| | | | | AF097996, AL442083, AL122100, AL389939, |
| | | | | S78214, AK025465, AL080158, AF079765, |
| | | | | AJ005690, AF111112, AF155148, I48979, |
| | | | | AF185576, AF116682, AK024594, AX019230, |
| | | | | AL137429, AK000618, AL137557, AF028823, |
| | | | | AL110196, A08908, Z82022, AK025632, A07647, |
| | | | | AK026927, AF146568, AL133619, AL157482, |
| | | | | I26207, AK026642, AK026959, AX045627, |
| | | | | AK025092, I17544, AL133557, AL117457, |
| | | | | AF130077, AL442082, AL110225, AL133568, |
| | | | | AL122118, E12747, AK024545, AK024992, |
| | | | | Y11254, AL359600, AX014095, AK026744, |
| | | | | AB048975, AF090903, AF130075, AL050116, |
| | | | | AF262032, AL096744, AL050108, AL080148, |
| | | | | AL050393, AX019229, X72889, D83032, |
| | | | | AL050277, AL133637, AI8777, I89931, |
| | | | | AK026894, AK026528, AK026613, AK000421, |
| | | | | E07108, Y14314, AL133016, AF260566, A03736, |
| | | | | AL080163, AF008439, X83508, AL137539, |
| | | | | AK026534, I89934, AR087170, AL162083, |
| | | | | AF090934, AF118094, AL050024, AL137478, |
| | | | | AJ299431, X80340, AR029490, AB048974, |
| | | | | AL137550, AK027160, AK026950, AF061795, |
| | | | | AF151685, AL353940, AL137548, AL137292, |
| | | | | Y10655, AF116688, AK025967, AL080159, |
| | | | | I03321, AL137271, AF130105, AK000250, |
| | | | | AF242189, AF130099, AL050149, AF061981, |
| | | | | AL137488, AF090901, AL137479, U51587, |
| | | | | A08907, AF130066, AF087943, AF143723, |
| | | | | E02349, AF116609, AL110197, AF079763, |
| | | | | Y09972, A12297, AF081197, AF081195, A15345, |
| | | | | AL162002, AL117648, AF100781, S68736, |
| | | | | AL137560, AL122106, AF111851, AL110296, |
| | | | | AF159615, AK026630, AB052200, AL122093, |
| | | | | U88966, AF113677, and AK026480. |
| 53 | HSYHD12 | 157 | 1209769 | AL520080, AL532356, AL520079, AL526894, |
| | | | | AL527586, AL527585, AV684581, AL526753, |
| | | | | BE543419, AI061464, AW000960, N39195, |
| | | | | AA233105, AA181583, AI493417, AI735156, |
| | | | | AI763138, AI470553, AA704923, AI342329, |
| | | | | AA182932, AA621175, W01643, N45263, |
| | | | | AA977119, N71629, AI700982, AA626568, |
| | | | | AI382784, AW196544, BE008953, BE778807, |
| | | | | AV682395, AJ404004, and Z59762. |
| 54 | HTAGF12 | 64 | 1276746 | AW467888, AW804959, AC006014, U52112, |
| | | | | AC005098, AC004084, AC005488, AC004166, |
| | | | | AC006241, AC004841, AC002067, AC003108, |
| | | | | AC007546, AC020904, AC005899, AC004965, |
| | | | | AC005052, AL135927, AC007227, AL033529, |
| | | | | Z85996, AP001670, AC004531, AC004971, |
| | | | | AC002365, AC005529, AC011462, AC007345, |
| | | | | AC008569, AC004491, AL031276, AL035659, |
| | | | | AC011491, AC011445, U52111, AC005332, |
| | | | | AC008738, AL050335, AC006337, AC004000, |
| | | | | U91321, AC007151, AF003626, AL035704, |
| | | | | AC004106, AL163280, AC007182, AL096701, |
| | | | | AL136136, AF053356, AC005482, AC004685, |
| | | | | AL138878, AL157938, AL049569, AP000555, |
| | | | | Z83844, AC025594, Z96074, AC006538, |
| | | | | AC005102, U95740, AC007679, AP001718, |
| | | | | AL118505, AC005839, AC006088, AC020908, |
| | | | | AC008267, AC005740, Z84469, AL035685, |
| | | | | AC004526, AC003101, AC003010, AC004967, |
| | | | | AC004382, AC020906, AC006038, AC005088, |
| | | | | AL121652, AL109627, AC007371, AC004980, |
| | | | | AC008085, AC019221, Z93015, AL035413, |
| | | | | AC004032, AL161445, AC020934, AL135901, |
| | | | | Z98051, and AC009155. |
| 54 | HTAGF12 | 159 | 1222309 | AW849533, AV718633, AV718938, AV699669, |
| | | | | AW378532, AW949498, AV718908, AW950117, |
| | | | | AV700313, AW129038, AV719049, BE069013, |
| | | | | AA224902, AA568204, AA570740, AA483606, |
| | | | | AW301736, AU148206, AI697239, AI697242, |
| | | | | BG222214, BG230549, AA425924, AV764001, |
| | | | | AW513905, AW467497, AA481887, AA302661, |
| | | | | AA523695, H73550, AV716708, AA127570, |
| | | | | AI418661, AA581247, AA837000, AA934680, |
| | | | | AI432298, BG230529, AI567391, H53284, |
| | | | | AA297006, BF920612, AI367551, AW069227, |
| | | | | AI243789, BE178489, AA165505, D34614, |
| | | | | I34294, AL157776, AC002550, AC004263, |
| | | | | AP000313, AC005777, AP001718, AC006123, |
| | | | | AP000050, Z85987, AL080243, AP000117, |
| | | | | AC006966, AL352976, AL137059, AC009003, |
| | | | | AL035587, AC007308, AC008687, AC004491, |
| | | | | AC008569, AC005206, AC011462, AP000322, |
| | | | | AC005829, AC006080, AC005236, AL034394, |
| | | | | Z93015, AL109797, AC004084, AC005522, |
| | | | | AL109743, AC005004, AC005667, AL096840, |
| | | | | AL158830, AC005488, AC008764, AC005015, |
| | | | | AC006115, AL353777, AL031311, AL049840, |
| | | | | AC002477, AL390374, AC005005, Z84466, |
| | | | | U80017, AL049709, AC010412, AC010789, |
| | | | | AL137853, AC016396, AC011495, AC007917, |
| | | | | AC006006, AF317635, AL035455, AK024205, |
| | | | | AC020908, AL359204, Z83856, AC004953, |
| | | | | AP000688, AL031432, AC016025, AF111168, |
| | | | | AL121585, AF240626, AC008770, AL354836, |
| | | | | AP001728, AP000053, AP000121, AC008040, |
| | | | | AC005480, AL049779, AP001727, AL031602, |
| | | | | AC020913, AL121891, AL355305, AL132777, |
| | | | | AC010618, AF305057, AL096870, AC004980, |
| | | | | AC010605, AC013734, AC009516, AC007383, |
| | | | | AC007225, AL121997, AC007686, AL353807, |
| | | | | AL117652, Z94044, AL049539, AC004019, |
| | | | | AL355916, AC007263, AL139099, AL136300, |
| | | | | AC005778, AC018673, Z98742, AP001724, |
| | | | | AP001725, AL135928, AC007666, AL022323, |
| | | | | AC004867, AC004526, AC009155, AC005839, |
| | | | | AL121900, AC010526, AL031681, AL050318, |
| | | | | AP000552, AC009244, AC011811, AP000503, |
| | | | | AL079342, AC007597, AC004655, AC013429, |
| | | | | AP000555, AC018663, AL050307, AC005391, |
| | | | | AC006449, AC006480, AL031005, AC007766, |
| | | | | AC007684, AL121915, AC005874, AF134471, |
| | | | | AC005328, AC008537, Z95152, AL118501, |
| | | | | AC006261, AL031133, AL031291, AC005280, |
| | | | | L78810, AC009509, AC005747, AC005104, |
| | | | | AC005207, AP000501, AC004257, AC005052, |
| | | | | AL133387, AC005509, AJ004799, AC006511, |
| | | | | AL049576, AL139384, AL136418, AL034405, |
| | | | | AC002350, AC009756, AC003982, AC006126, |
| | | | | AC009079, AC008009, AC024075, AL118520, |
| | | | | AC010553, AC005215, AC005324, Z81364, |
| | | | | AC008543, AC002301, AP000152, Z82190, |
| | | | | AC011455, AC008762, AP001053, AC022149, |
| | | | | AL157938, AC004000, AL354696, AC005225, |
| | | | | AC003029, AL121653, AL009181, AC005914, |
| | | | | AL133448, AC004962, AL031587, AB014588, |
| | | | | AL137139, AL132653, S42655, AL132713, |
| | | | | AC002390, AC087084, AL049766, AC010203, |
| | | | | AL132795, AF134726, AC004659, AC006285, |
| | | | | AL135839, AL353802, AC008474, AC005180, |
| | | | | AC004477, AL138756, AC009247, AL137100, |
| | | | | AP000300, Z93023, AP000565, AL049537, |
| | | | | AL161670, AP000311, AC004166, AC007283, |
| | | | | and AP001412. |
| 55 | HTHCA16 | 65 | 1243880 | BE561009, BE561108, BE271257, BE560999, |
| | | | | BE559581, BE560020, BE514226, BE560473, |
| | | | | BE561815, BE396998, BE559603, BE560070, |
| | | | | BE267963, BF974539, BE560782, BE396671, |
| | | | | BE513801, BE268138, BE268135, BE296340, |
| | | | | BE270072, BE269495, BE271160, BE513296, |
| | | | | BE269405, BE561821, BE513289, BE513449, |
| | | | | BE397933, BE397346, AW328031, BE267916, |
| | | | | BE267977, BE270500, AW732742, AL041617, |
| | | | | BE300743, AI004179, AW733048, BE300926, |
| | | | | BE207729, AA977079, AI638067, AI810553, |
| | | | | AL043588, AL040746, AI568276, BE740313, |
| | | | | AI492067, BF527899, AA017019, AA973063, |
| | | | | BE268669, AW577554, Z44581, BE207735, |
| | | | | BG122414, BE839851, BE839956, BF975663, |
| | | | | BE839944, BE839806, BE839820, AI990791, |
| | | | | BE839892, BE839810, BE839906, BE839855, |
| | | | | BF527373, BE839904, BE839896, BE839893, |
| | | | | BE839895, BF931640, AV683249, AA357141, |
| | | | | BE839822, N58603, BE839959, AI792408, |
| | | | | AI791923, BE839888, BE839808, BE839889, |
| | | | | BF155299, AW374023, W07130, BE839854, |
| | | | | BF772089, BE839899, BE839960, BF879354, |
| | | | | BF764629, AV647162, AV646714, BE839819, |
| | | | | BE839961, BE839907, BE839898, BE839813, |
| | | | | BE839962, BE839903, BE839801, BE839900, |
| | | | | BE836824, AA506752, AC005071, and |
| | | | | AF217981. |
| 55 | HTHCA16 | 160 | 1059497 | BE561009, BE271257, BE561108, BE560999, |
| | | | | BE559581, BE560020, BE560473, BE514226, |
| | | | | BE561815, BE560782, BE396998, BE559603, |
| | | | | BE560070, BE267963, BF974539, BE396671, |
| | | | | BE268135, BE513801, BE296340, BE268138, |
| | | | | BE270072, BE269405, BE269495, BE271160, |
| | | | | BE397933, BE513296, BE561821, BE513289, |
| | | | | BE513449, BE397346, AW328031, BE267977, |
| | | | | BE267916, BE270500, AW732742, BE300743, |
| | | | | AL041617, AW733048, AI004179, BE300926, |
| | | | | BE207729, AA977079, AI638067, AL043588, |
| | | | | AI810553, AL040746, AI568276, BF527899, |
| | | | | BE740313, AI492067, AA017019, AA973063, |
| | | | | BE268669, AW577554, Z44581, BE207735, |
| | | | | BG122414, BE839851, BE839956, BE839944, |
| | | | | BF975663, BE839806, BE839820, BE839892, |
| | | | | BE839810, BE839906, BF527373, BE839904, |
| | | | | BE839896, BE839893, BE839895, BE839855, |
| | | | | AI990791, BF931640, AA357141, BE839959, |
| | | | | AV683249, BE839822, N58603, BE839808, |
| | | | | AI792408, AI791923, BE839888, BE839889, |
| | | | | BF772089, BE839854, BF155299, AW374023, |
| | | | | BE839899, BE839960, W07130, BE839819, |
| | | | | BE839907, BE839961, BE839898, BE839813, |
| | | | | BE839962, BE839903, BE839801, BE839900, |
| | | | | BF879354, BF764629, AV647162, AV646714, |
| | | | | BE839955, BE836824, AA506752, AC005071, |
| | | | | and AF217981. |
| 56 | HNFIQ15, HWAAP41 | 66 | 1282887 | AA833887, AW575462, AW510946, AI620223, |
| | | | | AA648441, AW269713, AI524107, AA281769, |
| | | | | AW304696, AI372986, BF115889, AI440497, |
| | | | | AI826086, AI885846, AI148962, AI560987, |
| | | | | AU154251, BE675218, BE207490, AW295615, |
| | | | | BG235977, AW054789, AI554878, AI563935, |
| | | | | AW439487, AI369278, AI609040, AI810003, |
| | | | | AW965165, AI202784, AA720683, AI885219, |
| | | | | AI871248, AA749067, AA280892, AI040456, |
| | | | | W49531, AW006404, AI333761, AA045264, |
| | | | | AA810174, AI033893, AA836425, AW316675, |
| | | | | AI223206, AI817352, AA740402, AI151009, |
| | | | | AW302593, AW469783, AA031829, AI807838, |
| | | | | AA568174, AI921570, AA999995, AA602307, |
| | | | | N94335, AI150388, BE883850, T23626, N81097, |
| | | | | W37676, AA648458, AA935911, AA281428, |
| | | | | AL537444, R50741, AI222836, AI285029, |
| | | | | AA151329, AA626028, AA948149, AA853032, |
| | | | | AA458986, AA807256, AL523211, AI015270, |
| | | | | AI741627, AA621985, R79233, AI869588, |
| | | | | R20646, AI986040, N99140, F37149, AL538472, |
| | | | | AA045272, T58638, AW575463, AI368508, |
| | | | | AI185496, AA769469, AA743471, AI560366, |
| | | | | BF381797, AI741637, AW662063, AI738772, |
| | | | | F28687, AA076441, AA127821, AI372985, |
| | | | | AW796141, BF590617, AA627782, AA743487, |
| | | | | AL522131, BG059881, BE902755, AA903626, |
| | | | | BE902143, W23975, BG177827, AW084080, |
| | | | | BF340302, BE790023, AA587120, AL047883, |
| | | | | AA907245, BF892007, AL042954, AI952109, |
| | | | | AI452772, BG255834, H41759, AA225339, |
| | | | | AI174593, BF925363, AA830333, AV733470, |
| | | | | AL040558, AV715462, BG107315, AA149526, |
| | | | | AA764938, BG116399, AF001434, AY007161, |
| | | | | AF099011, AF042856, AJ001388, AF140224, |
| | | | | AB028456, AF130110, AF061943, AK026615, |
| | | | | AF130105, AK025113, AK026973, AL109725, |
| | | | | AF143723, L10376, X52128, AL096762, |
| | | | | AL117460, E15324, AJ010277, AL133047, |
| | | | | AK025356, AC020647, AR022283, AF130357, |
| | | | | AL137658, AF017437, X67813, AL133565, |
| | | | | AL137548, AF114168, X96540, AK027260, and |
| | | | | AL356800. |
| 56 | HNFIQ15, HWAAP41 | 162 | 1201579 | AL537444, AL538472, AL523211, BE559851, |
| | | | | AW965165, AI871248, AL522131, BF115889, |
| | | | | BE397650, BF683712, AI826086, BG235977, |
| | | | | AI524107, AW575462, AI810003, AI885219, |
| | | | | AA045272, AA045264, BE675218, AW054789, |
| | | | | AI560987, AA833887, AA280972, AI554878, |
| | | | | AI148962, AI885846, AW510946, AI563935, |
| | | | | AA720683, AI620223, AW439487, AI372986, |
| | | | | AI369278, AI609040, AA031829, AW304696, |
| | | | | AI440497, AU154251, AA151328, BE207490, |
| | | | | AI202784, AW269713, W49531, AI040456, |
| | | | | AI333761, AA280892, W49578, AA568174, |
| | | | | AI222836, AW006404, AI151009, AI033893, |
| | | | | AW316675, AA740402, AI807838, AW302593, |
| | | | | AI285029, AA810174, AW295615, AI817352, |
| | | | | BE883850, AA836425, AA648441, AA948149, |
| | | | | AI223206, N94335, AA281769, AA602307, |
| | | | | AA999995, AW469783, AA749067, T23626, |
| | | | | AI921570, R79502, W37676, AI150388, |
| | | | | AA648458, N81097, F37149, AA935911, |
| | | | | AA281428, N99140, R50741, H75402, BG177827, |
| | | | | W23975, AA298081, AA151329, AA626028, |
| | | | | AA853032, AA458986, AA807256, AA076525, |
| | | | | AL138204, R20646, R79233, R68182, AI015270, |
| | | | | AI741627, F28687, AA621985, AI869588, |
| | | | | AA298080, AA280662, AI986040, AA459124, |
| | | | | T58638, AW575463, R50285, AI368508, |
| | | | | AI185496, R50436, AA769469, AA298084, |
| | | | | AA743471, AI560366, BE890128, BF381797, |
| | | | | W37675, AI741637, AI372985, AW662063, |
| | | | | BE140883, AA280125, AI738772, T80700, |
| | | | | AA076441, BF374320, AW387036, AA127821, |
| | | | | AW796141, AW387048, BF590617, BE297808, |
| | | | | AA127869, AA627782, AA743487, BF345882, |
| | | | | BG059881, BE902755, BE295926, AA354619, |
| | | | | BE745320, AA903626, W46303, BE902143, |
| | | | | AW387062, N99901, AA345169, BF346209, |
| | | | | BE269911, AI568612, AW084080, BF340302, |
| | | | | AW134682, BE790023, AA587120, AL047883, |
| | | | | AW003337, AI684918, AW082395, AA907245, |
| | | | | AW117367, AW118157, BF892007, AL042954, |
| | | | | AI952109, AU158013, AI452772, BG255834, |
| | | | | H41759, AA225339, AI174593, BF925363, |
| | | | | AA830333, AV733470, AL040558, AF001434, |
| | | | | AF099011, AY007161, AF086188, AF042856, |
| | | | | AJ001388, AF140224, AB028456, AF130110, |
| | | | | AF061943, AK026615, AC007465, AF130105, |
| | | | | AK025113, AK026973, AL109725, AF143723, |
| | | | | L10376, X52128, AL096762, AL117460, E15324, |
| | | | | AJ010277, AL133047, AK025356, AC020647, |
| | | | | AR022283, AL137658, AF017437, X67813, |
| | | | | AL133565, AL137548, AF114168, X96540, |
| | | | | AK027260, and AL356800. |
| 56 | HNFIQ15, HWAAP41 | 163 | 1049987 | AW575462, AA833887, AW510946, AI620223, |
| | | | | AW269713, AI524107, AW304696, W49531, |
| | | | | AI372986, BF115889, AI871248, AI440497, |
| | | | | AI826086, AI885846, AI885219, AI148962, |
| | | | | AW295615, AI560987, BE675218, BE207490, |
| | | | | AW965165, BG235977, AW054789, AI554878, |
| | | | | AI563935, AW439487, AI369278, AI609040, |
| | | | | AI810003, AA720683, AW006404, AU154251, |
| | | | | AI202784, AA810174, AA280892, AA045264, |
| | | | | AI040456, AA031829, AI333761, AI817352, |
| | | | | AI033893, AA836425, AW316675, AI223206, |
| | | | | AA740402, AA281769, AI151009, AW302593, |
| | | | | AW469783, BE883850, AI807838, AA568174, |
| | | | | N94335, AI921570, AA999995, AA602307, |
| | | | | AA648441, AI150388, T23626, AA749067, |
| | | | | AA648458, N81097, AL537444, R50741, |
| | | | | AA935911, AA281428, W37676, R20646, |
| | | | | AA807256, AA151329, AA626028, AI222836, |
| | | | | AI285029, AA458986, AA948149, AA853032, |
| | | | | AL523211, AI015270, AA621985, AA045272, |
| | | | | AI869588, R79233, AI986040, N99140, F37149, |
| | | | | AL538472, T58638, AW575463, AI368508, |
| | | | | AI185496, AA769469, AA743471, AI560366, |
| | | | | BF381797, AW662063, AI738772, F28687, |
| | | | | AA076441, AA127821, AW796141, AI372985, |
| | | | | BF590617, AL522131, AA627782, AA743487, |
| | | | | BG059881, BE902755, AA903626, BG177827, |
| | | | | BE902143, W23975, AF001434, AY007161, and |
| | | | | AF099011. |
| 57 | HNHPS28 | 67 | 1243890 | AW021917, AL120976, AA468322, AW500250, |
| | | | | AW977540, BF899670, BF899672, BF899671, |
| | | | | AA632845, BE019467, BG222166, AA904137, |
| | | | | AI446474, AA482681, R92262, C14692, |
| | | | | AI753365, AA657835, AW515437, AW969743, |
| | | | | AI014920, AI623805, T52478, AI282531, |
| | | | | BE294700, AA483606, BE813932, AI923052, |
| | | | | AA570740, AA533176, AI581486, AI143051, |
| | | | | AW078909, AI446071, AW851816, AU131834, |
| | | | | BE150087, AA570344, AA568204, AW004884, |
| | | | | BF679672, AA878140, AW861583, AA468966, |
| | | | | BE739086, AI360558, AA614163, AI588837, |
| | | | | AA188676, AA862243, AA493898, AI984168, |
| | | | | AA070899, BF526831, AU118852, AA223174, |
| | | | | AL118925, AW516304, AW962006, H91062, |
| | | | | AU156393, AI679413, AI304929, AI312309, |
| | | | | AW968339, R43807, BG057207, AF157065, |
| | | | | AL391114, AL035659, U35114, AL049776, |
| | | | | U95740, AC024584, AC009307, AC005261, |
| | | | | AC008068, AC005180, AL031431, AC006501, |
| | | | | AC009086, AC007193, Z70050, AL021937, |
| | | | | AC001228, AC007404, AL031280, AC008567, |
| | | | | Z69917, AC011473, AC004778, AL034405, |
| | | | | AC020741, AC011479, AC000092, AC006480, |
| | | | | AC010271, Z82181, AC005881, AC011495, |
| | | | | AF254822, Z73986, AP001747, AC004526, |
| | | | | AL137818, AC007676, AC005015, AL163279, |
| | | | | AL365505, AC018758, AF243527, AL117382, |
| | | | | AF217490, AC005726, AC007969, AC010311, |
| | | | | AC012076, AC018764, AC005098, AL031432, |
| | | | | AL050335, AC009298, AC006211, AL110115, |
| | | | | AC007878, AC003037, AL096700, AC007666, |
| | | | | U02570, AL158040, AC002039, AC008265, |
| | | | | AC000070, AL359763, AL162458, AC004765, |
| | | | | AL133418, AL135924, AL096800, AC004854, |
| | | | | AC004382, AC010326, AC008784, AF165926, |
| | | | | AX039602, AC002484, AC011464, AC083871, |
| | | | | AC010203, AC008626, AC007226, Z93015, |
| | | | | AL135787, AC002470, AC008760, AC015651, |
| | | | | AC005730, AC004448, AL354864, AC083863, |
| | | | | AC007055, AC005080, AP001626, AC009087, |
| | | | | AC002544, AP001685, AC005971, AL034379, |
| | | | | AL022163, AC004089, AC008379, AC007308, |
| | | | | AC008521, AL445466, AC006468, AL121891, |
| | | | | AL136137, AC007684, AL121895, AL031311, |
| | | | | AC007565, AF220542, AC006023, AL163853, |
| | | | | AC010422, AL117348, U91326, AF015722, |
| | | | | AC004805, AC008752, AL359457, AL121658, |
| | | | | AC002543, AC011451, AC007900, AC009194, |
| | | | | Z93930, AL139353, AL049758, AP000509, |
| | | | | AF111168, AC027644, AC006275, AC005914, |
| | | | | AC010200, AC008733, AF275948, AL020993, |
| | | | | AC008649, AL031005, AC010102, AC008812, |
| | | | | AL162390, AL353748, Z99570, AL035460, |
| | | | | AL031255, AL034372, AC019227, AC002045, |
| | | | | AC004583, AC005358, AC005736, D14872, |
| | | | | AC000026, AF190465, AF207550, AP000959, |
| | | | | AL157768, AC024952, AC007387, AC008560, |
| | | | | AL034423, AC005324, AC010305, AC008764, |
| | | | | AL163268, AC008745, AC009331, AC005288, |
| | | | | AL031680, AL133391, AC004983, Z98742, |
| | | | | AC008126, AC006543, Z98750, AL138976, |
| | | | | AC002456, AC008616, AL109627, AP000099, |
| | | | | AL137139, AL034555, AL078646, AL139421, |
| | | | | AD001527, AC007860, AC005839, AP001745, |
| | | | | AL035071, AC005522, AC020916, Z82180, |
| | | | | AC005354, AC006334, AC008536, AL035587, |
| | | | | AC008551, AC007312, Y18000, Z99755, |
| | | | | AC008482, AP001435, AC005702, AC006544, |
| | | | | AL133174, AC002472, AC006057, AC005406, |
| | | | | AP000557, AL049745, AF001550, AL121886, |
| | | | | AC004811, AC011470, AP000036, AC005911, |
| | | | | AF073519, AC005037, AC006162, AC003002, |
| | | | | AL161665, AP000514, AL137162, AP000008, |
| | | | | Z99716, AC004980, AL078584, AL109952, |
| | | | | AL138878, AC005280, AC007785, AL135905, |
| | | | | AC007564, AL133245, AL137191, AC007907, |
| | | | | and AC027319. |
| 57 | HNHPS28 | 164 | 1209276 | BE813932, BE893349, AI807253, and BF950717. |
| 58 | HNTDN59 | 68 | 1280527 | AW955777, AU127795, AV699578, BE621969, |
| | | | | AI281940, AI346748, AU129292, BE005208, |
| | | | | AA524503, AW449058, AI634820, BF514115, |
| | | | | AA916758, BF000038, AU151450, BE467769, |
| | | | | BE464881, AI523530, AW511445, AI862532, |
| | | | | AA608828, AI949670, AW970765, AI857780, |
| | | | | AW295536, BF571416, AI377542, AI093088, |
| | | | | AI151251, AW614038, AV699485, AA287191, |
| | | | | AA287100, AW770401, AA448285, BF737449, |
| | | | | AA878147, AW337811, AI094118, AW593438, |
| | | | | AI679170, AA126509, AA824653, AI335819, |
| | | | | W17300, AI926067, AA724997, N89777, |
| | | | | BF445215, AI376326, AA693394, BF898929, |
| | | | | BF330087, H24089, W20017, AA780601, |
| | | | | AI262511, AA651916, H95444, AW023522, |
| | | | | AA708871, AW630974, AW605999, BF968034, |
| | | | | H95445, R43926, AW380437, C03566, |
| | | | | AW452210, R18816, H22911, AA334867, N91375, |
| | | | | R84237, AW020824, BE071575, W24107, D62482, |
| | | | | N91929, AI859420, D62471, BF946583, |
| | | | | BE708592, BF195756, AA658355, AI962246, |
| | | | | AA282731, BE967075, AW167926, AK023008, |
| | | | | AK022861, and AL163853. |
| 58 | HNTDN59 | 165 | 1215793 | AW955777, AU127795, AV699578, BE621969, |
| | | | | AI346748, AI281940, AU129292, BE005208, |
| | | | | AA524503, AI634820, AA916758, AU151450, |
| | | | | BE467769, AI523530, BE464881, AW511445, |
| | | | | AW449058, AI862532, BF000038, AW970765, |
| | | | | AA608828, AI857780, AI949670, BF514115, |
| | | | | BF571416, AI093088, AW295536, AI377542, |
| | | | | AI151251, AW614038, AA448285, AW770401, |
| | | | | AA287191, AV699485, BF737449, AA287100, |
| | | | | AA878147, AW337811, AW593438, AI679170, |
| | | | | AI335819, AA824653, AI094118, AA126509, |
| | | | | AA282731, W17300, AA724997, AI926067, |
| | | | | N89777, BF445215, AA693394, AI376326, |
| | | | | BE898929, H24089, AA780601, BF330087, |
| | | | | W20017, AI262511, H95444, AW023522, |
| | | | | AA708871, AW630974, AW605999, H95445, |
| | | | | AW380437, AA651916, BF968034, R43926, |
| | | | | C03566, AW452210, R18816, H22911, AA334867, |
| | | | | N91375, R84237, W24107, AW020824, BE071575, |
| | | | | D62482, N91929, AI859420, D62471, BF946583, |
| | | | | BE708592, BF195756, AA658355, AI962246, |
| | | | | BE967075, AK023008, AK022861, and |
| | | | | AL163853. |
| 58 | HNTDN59 | 166 | 1215794 | AI859420, BF330087, and AL163853. |
| 58 | HNTDN59 | 167 | 1210379 | AL529061, AL529060, BF025889, AI185800, |
| | | | | BF570353, BG035690, BF570347, BF972830, |
| | | | | BE797551, BE621696, AI815914, BE733418, |
| | | | | BF568490, AI355060, BF663029, BF568811, |
| | | | | BE531071, BF238101, BF972804, BE615211, |
| | | | | AI720942, BE562996, BF569853, BE727514, |
| | | | | AI401205, AI041996, BF686541, BE614837, |
| | | | | BE910466, BE744909, BF686056, AI992188, |
| | | | | BF568527, AW080259, BG255729, BF795533, |
| | | | | BF972645, BF569845, BF027352, BE728209, |
| | | | | BF975164, BE615946, AW080260, BE612647, |
| | | | | BE874826, AI478699, BE730928, BE741590, |
| | | | | BE616224, BG033808, AV704355, BE537861, |
| | | | | AW162630, BE394173, BE868076, BE906924, |
| | | | | AI749777, BG177826, AI832416, BE378109, |
| | | | | BE781845, BF684059, BE314958, AI949614, |
| | | | | AI565597, BE736455, BE871915, AI859275, |
| | | | | BE384814, AW051807, BE294364, BF972262, |
| | | | | BE893828, AI624559, BE745624, BG056658, |
| | | | | AV702685, BE889557, AI811664, AW262649, |
| | | | | BF238268, AW150095, BF970880, BG120687, |
| | | | | AV714903, AA654454, AA552688, AW304868, |
| | | | | AW102953, AI570837, BF127636, BE858287, |
| | | | | BE548275, BE873943, BG259729, AI921295, |
| | | | | BE874247, BF568476, BF125599, BF027446, |
| | | | | BE884117, BE621459, BE019587, AI660088, |
| | | | | AW769076, AI589608, BG056650, BE906768, |
| | | | | BF127827, AW327521, AI814476, AW327501, |
| | | | | AA644002, AI138313, AW072677, AI970696, |
| | | | | AI188158, AI422165, BE389121, AA732365, |
| | | | | AI092848, AI143551, AA743939, BG059883, |
| | | | | AA774241, AI633416, AW327574, AI419462, |
| | | | | AI149132, AI038173, AA417137, BG030545, |
| | | | | AI097634, AA989522, AA628121, AI017702, |
| | | | | AI339841, BF569101, AA770673, AA747736, |
| | | | | AI002563, AI142066, AA451650, AI094916, |
| | | | | AA576291, AI025480, AA191340, AA526372, |
| | | | | AA845860, BE906357, AI423595, AI131527, |
| | | | | BE770914, AW161032, AI609048, AI933016, |
| | | | | AW827283, AI819166, AI025652, AI073352, |
| | | | | AI055858, BF760056, BE733802, AI309777, |
| | | | | AA688407, AI079826, AA813021, W57669, |
| | | | | AW068728, AI359878, AA316104, AV645712, |
| | | | | AI762655, AA766876, T67923, AA191119, |
| | | | | AA442295, AI309331, AA307611, BF354705, |
| | | | | BE884749, AW572477, AW884641, AW161064, |
| | | | | AW089981, BE315556, BE870709, AA281383, |
| | | | | BF035335, AV655428, BF797165, AA527519, |
| | | | | AW068469, AW002793, AI271805, AI300885, |
| | | | | AA715400, AA410906, AW801345, BE256030, |
| | | | | AW020972, F27646, H28271, AA834150, H39530, |
| | | | | H25212, AA602160, AA229017, AV725738, |
| | | | | N59365, BF033589, AA761426, AI815639, |
| | | | | AA835946, H04530, AA148671, H42081, N36940, |
| | | | | H45682, AA071439, AW592055, AI022860, |
| | | | | AW605541, H42040, H19360, AA740357, H39988, |
| | | | | BE163159, AA989516, AA923346, H24393, |
| | | | | AA766621, AW769544, R73921, W81568, |
| | | | | H45724, BF026382, AV646342, BF445725, |
| | | | | AI758297, T96942, AI525255, AA978349, |
| | | | | AA416983, AA460758, AA083783, W23113, |
| | | | | R83209, BF760402, AA603765, D13900, X98129, |
| | | | | X98127, X98128, X98126, T60246, T60128, |
| | | | | T68071, R07754, R10635, R10636, T79112, |
| | | | | T97051, R19583, R20438, R27986, R28244, |
| | | | | R43558, R43558, H16202, H16203, H18921, |
| | | | | H42233, H42306, H42686, H42732, H44551, |
| | | | | H61138, N93540, W02759, W21348, W24769, |
| | | | | W74207, W79721, W81615, AA055481, |
| | | | | AA071211, AA148877, AA460159, AA229175, |
| | | | | AA514605, AA534834, AA551880, F15667, |
| | | | | AA658858, AA658940, AA661733, AA761406, |
| | | | | AA872483, AA888651, AA654808, AA410750, |
| | | | | AA450243, AA626255, AA813735, AI028772, |
| | | | | AI091947, T11022, Z25184, D25834, F00278, |
| | | | | AI245129, AI274610, AI469741, AI469793, |
| | | | | AI420154, AI566809, AI191000, AI637590, |
| | | | | AI263732, AI263765, AI524761, AI301254, |
| | | | | AI336088, AI682747, AW008707, AW075313, |
| | | | | AW518471, and AW779496. |
| 59 | HNTQM17 | 69 | 1283173 | AI207452, AV710565, BF794024, AI949938, |
| | | | | AI936201, AI829706, AI631489, AI094060, |
| | | | | AI093751, AA913548, AI796021, AW054881, |
| | | | | AI031866, BE084604, AW875236, AA962640, |
| | | | | AI092761, AA005229, AI669801, AW204350, |
| | | | | BF091658, AI608820, R56378, AA913113, |
| | | | | AI470546, AI914019, AA706311, AI692760, |
| | | | | AI024447, AI928379, AA483725, H05004, |
| | | | | AW955704, AW953941, AA595634, R56278, |
| | | | | AA364859, H05003, R83285, AW296235, |
| | | | | AI369969, BG029062, BF931159, BF213510, |
| | | | | AI991391, AI468617, AI767931, W19922, |
| | | | | AW815774, H51728, AW967633, BG108591, |
| | | | | AA251809, AX041040, AF119899, and |
| | | | | AF153906. |
| 59 | HNTQM17 | 168 | 1209252 | W19922, AW967633, BG108591, AA251809, |
| | | | | R38139, AA431646, H58518, R77536, R62239, |
| | | | | AA010808, T47540, and AX041040. |
| 60 | HNTTF76 | 70 | 1243907 | AW151247, BE077105, AW272389, AW275432, |
| | | | | AI791659, AI358928, AI984168, AI355246, |
| | | | | F23338, BE154909, AI336771, BE328286, |
| | | | | BE043339, AI288033, BF940118, AA298365, |
| | | | | AW974363, D44672, BE073116, AI973173, |
| | | | | AA489390, AA533040, BF528591, AI801563, |
| | | | | AU120416, AA666295, BF221463, AI174703, |
| | | | | AL035977, H79601, AI285651, AA493789, |
| | | | | AI978712, AW510403, AA397355, BF678348, |
| | | | | BE245594, AA810158, AA551968, AI283938, |
| | | | | AA484892, AI123488, AA676592, BF681369, |
| | | | | BG231195, AA503144, AV751848, AA729037, |
| | | | | AW008184, AW166879, AI090377, AI678812, |
| | | | | AI915081, AA595661, AU151751, AW069227, |
| | | | | AW439867, AA846923, AL048060, AI797998, |
| | | | | AW880986, AI816058, AA568314, AU160445, |
| | | | | AW970588, H82636, AA573067, AI697235, |
| | | | | AU159614, BG110480, AA492424, AA832145, |
| | | | | AI792092, AW963397, AI821056, AI821805, |
| | | | | AA838091, AA721506, AW341978, AI565084, |
| | | | | AI249688, AI355103, BF668362, AI224619, |
| | | | | BE042511, AI065031, AA535216, AI697239, |
| | | | | AA525753, AI697242, AL023804, AC004106, |
| | | | | AC004408, AC006241, AC009516, Z48051, |
| | | | | AC006162, AC004025, AC026704, AL050328, |
| | | | | AC004491, AL137012, AC002544, Z75407, |
| | | | | AC006511, AL050349, AL139396, AL139100, |
| | | | | AC006473, AL158823, AC002418, AC006210, |
| | | | | AL353804, AL031662, AC011484, AL158830, |
| | | | | AF134726, AC010150, AC008074, AC009244, |
| | | | | AL121712, Z83843, AC010205, AC022148, |
| | | | | AC004832, AC005409, AC004386, AC008752, |
| | | | | AC016995, AC011470, AP000503, AC005911, |
| | | | | AC005940, AC003029, AL049636, AC002314, |
| | | | | AL117694, AC006312, U82828, AL109743, |
| | | | | AC002425, AL008726, AL136137, AC006013, |
| | | | | AC002404, AC004821, AC008738, Z83820, |
| | | | | AC009032, AL136969, AC011465, AL158040, |
| | | | | AL109797, AL133273, AC005695, AL158172, |
| | | | | AC005531, AL133383, AK027128, AC004805, |
| | | | | AL445490, AL031584, AC068499, AL049610, |
| | | | | AL034420, AC008984, AC007226, AL035420, |
| | | | | AC007785, AC005778, AC000039, AC002310, |
| | | | | AC010084, AC007216, AL355520, AP000045, |
| | | | | AC005052, AP001477, AL031297, AC007899, |
| | | | | AP001712, AL139318, AC008762, AC005014, |
| | | | | AC008521, AC005284, Z84480, AL023553, |
| | | | | AL096791, AL034548, AC001642, AC002430, |
| | | | | AL008725, Z98304, AC005736, AC004846, |
| | | | | AC019181, AC006132, AC004797, AF015416, |
| | | | | AC006441, AC005031, AC020728, Z97183, |
| | | | | AL138836, AC020906, AL359846, AC005231, |
| | | | | AL022323, AL136132, AL022320, AB003151, |
| | | | | AC007563, AC007559, AC002073, AC004253, |
| | | | | AL035681, AC009086, AF217413, Z83847, |
| | | | | AC003101, AC009248, AL049795, AL159169, |
| | | | | AC006468, AC002350, AC011299, AL121891, |
| | | | | AC007182, AC005049, AC006023, AL109827, |
| | | | | AP000501, AC006017, AC007384, Z82243, |
| | | | | AC025436, AC005924, AC011475, AL009181, |
| | | | | AC005593, AP000553, AL121829, AC002045, |
| | | | | AC006121, AP000512, AL022316, AL136305, |
| | | | | AL049872, AL096814, AL162740, AC012000, |
| | | | | AP000113, AL121658, AC008555, AC004973, |
| | | | | AL035704, AC018719, AL117336, AL158141, |
| | | | | AP001760, AL022726, Z74739, AL161937, |
| | | | | AC004012, AC005684, AL138914, AL031311, |
| | | | | AL138752, AC008403, AL138958, AC020912, |
| | | | | L78810, AL034417, AC003108, AC003962, |
| | | | | AL117352, AC004152, AC005933, AP001746, |
| | | | | AL033520, AP000152, AC010328, AC007129, |
| | | | | AL135927, AC007227, Z97056, AL022315, |
| | | | | AL049775, AL159997, AC005821, AP001721, |
| | | | | AF091512, AC004980, Z82184, AC005971, |
| | | | | AC083863, AC009311, AC002477, AL136000, |
| | | | | AC083871, Z84466, AC004168, AC005953, |
| | | | | AL139084, AF109907, AC004840, U91321, |
| | | | | AL137139, AC011491, AC002288, AL132713, |
| | | | | Z93017, AC010271, AC008688, AC003007, |
| | | | | AF254822, AC025435, AL031664, AP000330, |
| | | | | AC006329, AL109935, AC007406, AC004776, |
| | | | | AC008545, AJ003147, AC020898, AC005632, |
| | | | | AC005899, AL162430, AC005233, AL137127, |
| | | | | AP000300, AC006275, AC008687, AP001207, |
| | | | | AC007390, and AC002301. |
| 60 | HNTTF76 | 169 | 1213468 | AL023804. |
| 61 | HCFGD60 | 71 | 1253155 | AW593931, AW663439, AI651376, AI218380, |
| | | | | H23154, H09531, AC003093, AL137013, |
| | | | | AL137918, and AL352979. |
| 61 | HCFGD60 | 170 | 1212775 | AW593931, AW663439, AI651376, AI218380, |
| | | | | H23154, H09531, AC003093, AL137013, |
| | | | | AL137918, AL352979, and AC016995. |
| 62 | HMUEP30 | 72 | 1262057 | BE729574, AL525054, BE734296, BE613340, |
| | | | | BE745405, BE549234, BE311981, BE899322, |
| | | | | AI079540, BE742508, BE379419, BE903604, |
| | | | | BE612600, BE747302, BF339777, AW301090, |
| | | | | BE877226, BG164618, BF033662, BE909447, |
| | | | | BE782991, BF792659, BE788807, BE746235, |
| | | | | BE259564, BF686415, BG116654, AW245743, |
| | | | | AL110467, BE265746, BE382926, BG167167, |
| | | | | BF316896, BE266690, AI870747, AI435074, |
| | | | | AI810818, BG249818, AA426021, AA443445, |
| | | | | AI675429, BE254649, AI380916, AW016054, |
| | | | | BF939243, AW197499, AI968701, AW015418, |
| | | | | AI085552, AI803701, AI609029, AI917395, |
| | | | | AI627419, AI243526, BF448768, BF350582, |
| | | | | AI813835, H68793, AW271667, BE780379, |
| | | | | AI184105, AA418059, AA838309, N36450, |
| | | | | AW245387, AA054185, N51652, H06674, |
| | | | | AA852859, AA505926, W00635, AA428116, |
| | | | | AA993193, AI350611, AI074877, T71376, |
| | | | | AI813850, AI609552, H68794, BE829913, |
| | | | | H82530, AA836943, AA852860, AA557951, |
| | | | | BF928087, H86659, BE890771, AI499309, |
| | | | | BF130572, BE840422, AI623897, R96119, |
| | | | | AI867284, AW002546, AW630507, H96259, |
| | | | | AA814467, AA443541, AA417955, T71246, |
| | | | | AI288285, BF342070, AI500077, BF055737, |
| | | | | AI611348, AL038445, AI917252, AL041772, |
| | | | | BG250190, BG260037, BG109270, AI866770, |
| | | | | AV707296, AI476109, AL046926, AA738104, |
| | | | | BF726160, AI340627, BG168549, AA470491, |
| | | | | AL120736, AW946806, AW075413, BF811780, |
| | | | | AL119791, AI869367, BE785868, BE781369, |
| | | | | BF904189, AC011479, AF061943, AB051158, |
| | | | | AK026583, AF017437, AF111851, AL049464, |
| | | | | X84990, AL117585, AL442082, AF090943, |
| | | | | AF242189, AK024538, AF104032, AF116644, |
| | | | | AL050024, AF225424, AK026542, AF116602, |
| | | | | I89947, A08916, AF219137, U72620, X70685, |
| | | | | AR011880, A08910, A08909, I48978, A08913, |
| | | | | AK026629, AF113019, I89931, AF130099, |
| | | | | AR087170, AF130059, I48979, AK026353, |
| | | | | AR070212, AJ242859, AR079032, AF183393, |
| | | | | AF091084, AL137550, AF118070, AL359615, |
| | | | | AL157431, AL117435, AK026855, AR059958, |
| | | | | AF125948, AL050393, AL110221, AL049466, |
| | | | | AF078844, Z82022, AB047904, AF116631, |
| | | | | AF130077, AL137463, AL110225, AK025084, |
| | | | | AF116691, I33392, AK025906, AL137459, |
| | | | | AK025491, AL050116, AF260566, AF314091, |
| | | | | AF113694, AX019230, AK026504, AL137557, |
| | | | | AF119865, AF125949, AF056191, A12297, |
| | | | | AX046603, AF218014, AX005848, AX005804, |
| | | | | AF158248, AL117394, AB048964, AF116639, |
| | | | | AL133557, AF130104, AF118094, U00763, |
| | | | | AF119878, AK000432, AL162006, AK027213, |
| | | | | AF113676, X96540, AX019229, AL080159, |
| | | | | X72889, AF116688, AF113677, AK024588, |
| | | | | AF097996, L31396, AK025967, Y11254, |
| | | | | AF113699, AK026959, AL133075, AB052200, |
| | | | | AK025524, AL390167, AF111847, AL353940, |
| | | | | AL133113, U42766, AX026824, AX026823, |
| | | | | A58524, A58523, AF130082, AK000618, |
| | | | | AK024524, AF130066, AK027200, AL133080, |
| | | | | E02349, AK027204, AK027164, AL050108, |
| | | | | AL162062, L31397, AF090900, AF130075, |
| | | | | AF146568, AF118064, AB048953, AF166267, |
| | | | | AF113013, AF090903, AL122093, I03321, |
| | | | | AL049452, AK026526, AK000647, AK026086, |
| | | | | AK025391, AL110197, AL137648, AL117460, |
| | | | | AK026593, AK026452, AK026534, AL080060, |
| | | | | AF113690, AL049300, AK027096, AF119899, |
| | | | | Y11587, AL049314, AF113691, AB048954, |
| | | | | AF119860, AF116654, AF207829, AJ238278, |
| | | | | AL359601, AL050149, AL157482, AF090896, |
| | | | | U80742, AL050138, U35846, AB019565, |
| | | | | AL133606, AL122123, AK000445, E07108, |
| | | | | AL117457, AL133016, AL050146, AL442072, |
| | | | | X63574, AB034701, AF116682, AL080127, |
| | | | | AL080124, AL133014, AL162083, AL122050, |
| | | | | AB047615, AK026045, S78214, AL117583, |
| | | | | AL050277, AK026741, AF116646, AB049758. |
| | | | | AL133560, AL389982, AL122121, AL122110, |
| | | | | AK026592, AF090934, AK026597, AK027116, |
| | | | | AL110196, AJ000937, AL049430, AL133640, |
| | | | | AK025339, AL359596, AK026784, AK025092, |
| | | | | AF130105, AK026927, AF138861, AX006092, |
| | | | | AK000323, AF026816, AF177401, AK025484, |
| | | | | AK026647, AK026865, A03736, AF106862, |
| | | | | AB052191, X82434, AF119894, Y16645, |
| | | | | AL359618, AK026651, AF175983, AF017152, |
| | | | | AK026532, AK000718, AL137527, U91329, |
| | | | | AK000652, AL359941, AK027113, E03348, |
| | | | | AF113689, AL133093, AF119875, AL389978, |
| | | | | A65341, A77033, and A77035. |
| 62 | HMUEP30 | 171 | 1209865 | BE903604, BE788807, BE379419, BG116654, |
| | | | | BE782991, BE549234, BF686415, AL525054, |
| | | | | BE909447, BE745405, BE382926, BE877226, |
| | | | | BF792659, BE729574, BE734296, BG167167, |
| | | | | BE746235, BE612600, BE266690, BF033662, |
| | | | | BE742508, BG249818, AA443445, AI380916, |
| | | | | BE747302, BE899322, BE254649, H68793, |
| | | | | N36450, AA054185, H06674, BE780379, |
| | | | | AA428116, BF316896, AA852859, T71376, |
| | | | | BE829913, H82530, BE311981, H86659, |
| | | | | BE259564, BF130572, BF339777, BE613340, |
| | | | | BG164618, BF350582, AW630507, AW245743, |
| | | | | BE890771, BE265746, AA443541, AA838309, |
| | | | | AL110467, and AC011479. |
| 63 | HNSCA10 | 73 | 1268201 | BG260541, AW967069, BE541744, BG028272, |
| | | | | BE546267, BE561971, BF036322, BF064225, |
| | | | | BF340450, BF245281, BF968759, BG027740, |
| | | | | W56044, N35799, AA233837, AI276495, |
| | | | | AA478375, BE074335, AI276218, BE539688, |
| | | | | AA679425, AW300731, AA700229, AI986265, |
| | | | | AI310474, N68373, AA351865, AA009569, |
| | | | | C05871, AW137718, AA422073, AV658880, |
| | | | | AA211039, AA317491, C06442, AI186371, |
| | | | | AI468426, AA232803, AA541363, AW380398, |
| | | | | H51981, W28357, AA478315, AA234338, |
| | | | | AW079108, AW972914, AA234372, T98354, |
| | | | | T98355, BE878609, AI383307, AA680060, |
| | | | | AI932918, BF850967, AA441825, R06867, |
| | | | | AI143413, BF734394, T81721, AI831550, |
| | | | | AI857452, AI949949, AA295711, BF433630, |
| | | | | C02103, BG151447, AI472405, BE551108, |
| | | | | AV739493, AW999933, AA441888, AI952677, |
| | | | | AK027031, AX041033, AC004050, and |
| | | | | AL096861. |
| 63 | HNSCA10 | 172 | 1209403 | BE541744, BE561971, BF968759, BE878609, |
| | | | | BF850967, R06867, T81721, AI831550, AI857452, |
| | | | | AI949949, AA295711, BF433630, BE551108, |
| | | | | AV739493, AK027031, AX041033, and |
| | | | | AC004050. |
| 64 | HTPAO67, HAPNY67, | 74 | 1280558 | AW888224, AU140905, BF526339, BF914797, |
| | HAWCB75, | | | AW391265, BF672993, AA196345, AW580939, |
| | HBMTN71, | | | AW511241, AA150505, AI937452, AV715700, |
| | HE9GW86, | | | AI693483, BF732946, AW270912, W72082, |
| | HUVCQ29, | | | AI623367, AW792827, AA625461, AW070540, |
| | HUVCV06, HWEAC51 | | | AA702989, BF693967, BE930195, AW005477, |
| | | | | AA745718, AI341881, BF433329, AI081372, |
| | | | | BE549661, BF114825, BF114817, BE825874, |
| | | | | AU158733, AA491502, AI290320, AA196201, |
| | | | | AI761788, AW167390, BE671226, AW305344, |
| | | | | AI884820, AI123776, AI339727, BE926192, |
| | | | | AI088627, W77865, N64436, AA143225, |
| | | | | AW516848, AI378169, AA722538, BF789920, |
| | | | | BF511845, AA156709, AI800883, BF590546, |
| | | | | AA634764, AA634851, AA157484, AA487558, |
| | | | | AI051045, BF588574, AA156058, AW452319, |
| | | | | AI093977, R14981, BF594817, T51983, AI380234, |
| | | | | AI494043, AA044236, BF940406, AA044317, |
| | | | | AW008668, AI469671, AV661450, BE825878, |
| | | | | H47918, AW139589, W77734, R33962, AI247748, |
| | | | | Z21665, BE138884, BE768709, BF869334, |
| | | | | T35175, T09113, AA143264, AA369518, |
| | | | | AA295164, BE818147, T30835, AA707552, |
| | | | | BE768474, H28298, BE818136, BE244180, |
| | | | | AA502865, T99035, D56581, AA989373, R19192, |
| | | | | R11444, AI371503, AI378925, R45672, BE843234, |
| | | | | AV693070, BE715148, D78748, AI565274, |
| | | | | BE826551, T86040, AI473296, BF943545, T39925, |
| | | | | AA332790, AV748038, AI581758, AA029719, |
| | | | | AW614656, AA788793, BE855998, AW134741, |
| | | | | AW385835, AW860248, BE843270, AW860291, |
| | | | | AA029658, BF328526, AW150037, AI682553, |
| | | | | T52064, AW364102, H28299, BE826272, |
| | | | | BE245566, AI472407, BF994245, D45686, |
| | | | | BE828413, BF998442, AW391267, BF994255, |
| | | | | BF810588, T64061, BF846655, AA657586, |
| | | | | AA663093, BE258387, AI539227, AA063008, |
| | | | | BE155359, AV732104, R43678, AA582524, |
| | | | | BF935422, T17124, H00500, AV734398, |
| | | | | AW732493, AI660888, BF870037, BE826155, |
| | | | | BE009502, BF993620, BF993806, BF928050, |
| | | | | F10390, AI383122, AA504862, AL047141, |
| | | | | H67496, T93255, AL515339, AI624992, |
| | | | | BE175135, AI284163, AI264894, AL514843, |
| | | | | BE160648, AA985341, AW818447, AW946309, |
| | | | | BF812941, AA235179, AV731179, N26664, |
| | | | | H98748, AW904884, AL043608, AW368288, |
| | | | | AW935059, AW937739, AI267212, BF804959, |
| | | | | BF772534, BE149266, AR079398, AL118508, |
| | | | | AC069015, AC058786, AF109906, AL450170, |
| | | | | AC009113, AF110520, AF289667, AL359382, |
| | | | | AL031433, AC007049, AC002060, AC005992, |
| | | | | AC023118, AC006367, AC008750, Z72001, |
| | | | | AF163865, Z95329, AJ251154, X13424, |
| | | | | AC026714, AL031311, AP001711, AC005725, |
| | | | | AC026425, AF274313, AL160008, AC004699, |
| | | | | AL096706, AC002324, AC010169, X69875, |
| | | | | AC023789, U47924, AL109976, AL356098, |
| | | | | AF220294, AL139102, AL078633, AF287263, |
| | | | | AL031274, AC004093, AF289666, U00186, |
| | | | | AP001289, AF050157, AC011489, Z92542, |
| | | | | AC009487, AL158836, AL162578, AC002109, |
| | | | | AL163208, AC068496, AC007126, AJ245491, |
| | | | | AB017653, AF242432, AF225898, AC000403, |
| | | | | AC005751, AC007077, AF042090, AC007151, |
| | | | | AC007717, L10624, AC008831, AC018758, |
| | | | | AL356117, Z84489, AP002534, AL357272, |
| | | | | AP000563, AC006197, AC007628, AL163282, |
| | | | | AL008710, AC006584, AF071080, AP000210, |
| | | | | AP000132, AC001231, AC022173, AC007297, |
| | | | | AF185109, X81439, AC010198, Y09900, |
| | | | | AC083866, AC009154, AC008952, AC006453, |
| | | | | AF217413, AP001719, AC000387, AC007405, |
| | | | | AL031279, AJ251788, AJ251835, AC025572, |
| | | | | AC068906, AL121916, AL135745, AC025472, |
| | | | | AC007850, Z83826, Z95114, AC034109, |
| | | | | AL078630, AC009429, AC009287, AC007636, |
| | | | | AC007306, AL353581, AC012397, AL023694, |
| | | | | AC002074, Z98200, AC008160, AL080285, |
| | | | | AC003694, AC005486, AC023796, AF289665, |
| | | | | AC005696, U00213, AC004779, U00124, |
| | | | | AC005564, AC005833, AC026807, AL137524, |
| | | | | Z94057, AL121758, AC007052, AJ131112, |
| | | | | AF049850, AL080313, AC005105, AC005913, |
| | | | | Z99916, AC005968, AL034375, AE000665, |
| | | | | AB009692, AC020744, M30012, AC020914, |
| | | | | X82569, AC008011, U05005, D87024, AC008109, |
| | | | | AL133383, AC010201, AL118502, AC022212, |
| | | | | S66481, AP000403, AC004848, AC007511, |
| | | | | AC019055, AL022166, AC020969, AC013412, |
| | | | | AC007103, AL121949, AL035457, AJ278435, |
| | | | | Z86062, AL096763, U96809, AL158080, |
| | | | | AP001726, AL121790, AK027209, AL445984, |
| | | | | AC006949, AJ297131, Z16428, AF217490, |
| | | | | AL096699, AL031653, M81257, AC007568, |
| | | | | U01223, AL445532, Z97989, AC006484, X89152, |
| | | | | AF009326, AC005191, AC007917, Z92545, |
| | | | | AC006007, U00207, U00206, AC025167, |
| | | | | AF142451, AP001433, AC011500, AC007317, |
| | | | | AC007844, AL024497, AB030448, AC034108, |
| | | | | AC009470, Z24204, AL031391, AC011013, |
| | | | | AC004662, AJ248237, AP000014, U19755, |
| | | | | AC008844, I31518, AJ243630, and AJ248236. |
| 64 | HTPAO67, HAPNY67, | 173 | 1217178 | AW888224, AW391265, AA196345, AW792827, |
| | HAWCB75, | | | W77865, AA157484, AA156058, R14981, |
| | HBMTN71, | | | BF914797, AV661450, H47918, T09113, |
| | HE9GW86, | | | AA295164, T30835, BE244180, BF869334, |
| | HUVCQ29, | | | BE715148, AA332790, AA369518, BF328526, |
| | HUVCV06, HWEAC51 | | | BE245566, AV748038, AW391267, AV715700, |
| | | | | BF810588, T86040, BF846655, AA657586, |
| | | | | AA663093, BE258387, AI539227, T52064, |
| | | | | AA063008, BE155359, AV732104, R43678, |
| | | | | AA582524, BF935422, T17124, H00500, |
| | | | | AV734398, AW732493, AI660888, BF870037, |
| | | | | BE826155, BE009502, BF993620, BF993806, |
| | | | | BF928050, F10390, AI383122, AA504862, |
| | | | | AL047141, H67496, D78748, T93255, AL515339, |
| | | | | AI624992, BE175135, AI284163, AI264894, |
| | | | | BE160648, AA985341, AW818447, AW946309, |
| | | | | BF812941, AA235179, AV731179, N26664, |
| | | | | H98748, AW904884, AL043608, AW368288, |
| | | | | AW935059, AW937739, AI267212, BF804959, |
| | | | | BF772534, BE149266, BF850335, AV653934, |
| | | | | AL514843, BE173226, AV731666, BF886193, |
| | | | | BF850846, AA372659, AW900629, BG110723, |
| | | | | AI671895, AI916820, AI916812, AI824856, |
| | | | | AI800289, BF871134, BE147606, AW994206, |
| | | | | AI671439, BE246138, BG036796, BF934849, |
| | | | | AV731788, AV732416, AA679831, AI652604, |
| | | | | AL118508, AR079398, X69875, U00186, L10624, |
| | | | | AF185109, X81439, Y09900, AL356117, U00213, |
| | | | | U00124, M30012, X82569, U05005, AX022325, |
| | | | | AC002397, S66481, AK027209, AP000317, |
| | | | | AP000119, AP000166, AP000051, Z16428, |
| | | | | U01223, X89152, U00207, U00206, AF142451, |
| | | | | AF274313, AC025809, Z24204, AL450170, |
| | | | | AJ248237, AJ243630, I31518, AJ248236, U12242, |
| | | | | AJ248235, U00190, U00191, Z23546, AJ230988, |
| | | | | E14395, AC005240, AF213183, AF146643, |
| | | | | AJ233849, U89595, U79994, Z47352, AJ010348, |
| | | | | AC004699, AF019673, Z23351, U06682, |
| | | | | AB005207, U89559, U00234, U00205, AF142464, |
| | | | | AF286659, Z24199, AF286661, U00204, Z16472, |
| | | | | AF190638, AC005479, AC022173, AL136231, |
| | | | | AJ230995, M14088, AJ230904, X85072, L36916, |
| | | | | U53916, Z17116, AF142460, AF142463, M26926, |
| | | | | AF142462, AF142461, AF259763, AF142454, |
| | | | | AF142443, AF142466, X98122, AF012871, |
| | | | | AF043457, AC003971, AL353581, AC011489, |
| | | | | Z98050, U00125, U09204, U38929, AB046611, |
| | | | | M38184, M64494, M20549, M27450, Y09086, |
| | | | | U43332, X72805, U37071, M18207, AB030448, |
| | | | | U83462, AB028952, X13424, AF152533, |
| | | | | AF098866, AF175760, AF180472, K02138, |
| | | | | AB025352, U19755, AL136165, AF092505, |
| | | | | Z70049, AX015907, AL158080, AJ251154, |
| | | | | AL160008, AF242432, AL137064, AF084363, |
| | | | | AL031433, AL031279, AC058787, AC006484, |
| | | | | AC024068, AC004093, AF109906, AC003061, |
| | | | | AC007717, AC004386, AC066688, AL162578, |
| | | | | AC009487, Z95114, U89915, U00224, AL031311, |
| | | | | U89565, AC005304, AF130518, Z17334, U00209, |
| | | | | U80821, Z24174, AF259072, AF289667, U49172, |
| | | | | AL136090, AF268904, Z24216, AJ286860, |
| | | | | U79311, U20365, AJ230892, Y12733, Z23396, |
| | | | | U78025, Z16750, AF055865, AF142449, Z83826, |
| | | | | AF019675, AC009113, Z16748, Z95201, |
| | | | | AJ286862, I31332, AF070003, X66063, U78019, |
| | | | | AC006949, AC068496, AL354915, AF007424, |
| | | | | AF126182, U63067, AF271116, U00227, |
| | | | | AJ286854, AF169162, AF096268, AB022159, |
| | | | | D87024, AC007636, AC007306, AL008710, |
| | | | | M95004, AC020914, Z92542, AC005696, |
| | | | | AC005029, X12552, Z23295, AF276118, |
| | | | | AX015902, AX015908, AL049178, Z16507, |
| | | | | U00212, Z23458, U00236, U00232, U95613, |
| | | | | AF142446, AF142448, AF107342, AC007628, |
| | | | | AC005598, AC006977, AF288738, AF016497, |
| | | | | AF144624, AB038999, D86631, U50767, M57293, |
| | | | | E12159, M37278, M81257, AF116520, M33312, |
| | | | | AF217413, AJ271975, AC005615, AF172642, |
| | | | | AC069015, AC000057, AC026770, AC025167, |
| | | | | AP000171, AP000056, AP000124, AL021307, |
| | | | | AF281074, AC007362, AL022396, AL078630, |
| | | | | AC006584, and AC008109. |
| 64 | HTPAO67, HAPNY67, | 174 | 1217177 | AW888224, BF526339, BF672993, AW511241, |
| | HAWCB75, | | | AA150505, AI937452, AI693483, AW270912, |
| | HBMTN71, | | | AI623367, AA625461, BF693967, BE930195, |
| | HE9GW86, | | | AW005477, AA745718, AI341881, BF433329, |
| | HUVCQ29, | | | BF114825, BF114817, AI081372, BE549661, |
| | HUVCV06, HWEAC51 | | | BE825874, AA196201, AU158733, AI290320, |
| | | | | AA491502, AI884820, BE671226, AI123776, |
| | | | | AI088627, BE926192, AA143225, AW516848, |
| | | | | BF789920, AA722538, AA156709, R45672, |
| | | | | AI800883, AA634851, AA487558, BF588574, |
| | | | | AI051045, AI093977, W72082, AA702989, |
| | | | | BF732946, AW070540, AW305344, AI339727, |
| | | | | T51983, BF594817, AI494043, AA044236, |
| | | | | AI378169, AA044317, BF940406, BE825878, |
| | | | | AW008668, AI469671, N64436, AW139589, |
| | | | | W77734, Z21665, AI247748, BE138884, |
| | | | | BE768709, R33962, T35175, AA143264, H28298, |
| | | | | BE768474, AA707552, AA502865, D56581, |
| | | | | AA989373, R19192, AI371503, AI378925, |
| | | | | AV693070, AW167390, AI565274, AI473296, |
| | | | | T39925, T99035, AI581758, AA029719, |
| | | | | AW614656, AA788793, AW134741, BE855998, |
| | | | | AW860248, AW860291, AA029658, AW150037, |
| | | | | AI682553, AW364102, H28299, BE826272, |
| | | | | AI472407, AW580939, D45686, BE828413, |
| | | | | AA634764, BE877884, AW190377, BG179355, |
| | | | | AV742449, AI830256, and AL118508. |
| 65 | HAZCB15 | 75 | 1243853 | AV763460, AI890297, AW970856, AA171400, |
| | | | | AI254267, AA218684, BF725436, AW338376, |
| | | | | AW265468, AW504667, AW021674, AA084320, |
| | | | | AI444575, AI174703, BF913232, AI754257, |
| | | | | AW157424, BE882869, AA568303, BE875478, |
| | | | | AI076729, BF790866, BE244308, BE677164, |
| | | | | BE747923, BF680232, AV727766, N26159, |
| | | | | AV758849, BG109302, AA935827, BF846619, |
| | | | | AW839858, H24331, AW410844, AI813920, |
| | | | | AA765899, AW575808, AW327673, AI744199, |
| | | | | AI003068, AW157128, AV732057, BF679568, |
| | | | | AI753131, BG180320, AV753446, AI038029, |
| | | | | AL121039, AI702049, AI890283, AW023975, |
| | | | | AW960129, AA618531, AA554289, AI828721, |
| | | | | AW085811, BG059924, AW419201, AI921744, |
| | | | | BG259634, AI860423, AI570067, AI281622, |
| | | | | AA595661, AW731858, BF792103, AI572680, |
| | | | | AU120423, AW850985, AV712092, AI609992, |
| | | | | AW474825, AV764119, AW963295, AI446618, |
| | | | | AA507623, BF724416, AI889177, AW085626, |
| | | | | AA568311, AA601336, BF218253, AV731938, |
| | | | | AW148821, AI312267, AW576388, AU147226, |
| | | | | H05066, AW514844, AA493245, BE967607, |
| | | | | BF971234, AI434103, AW243817, AW963552, |
| | | | | AV730440, AW855527, AA640305, AI567676, |
| | | | | AW875184, AI538404, AI745666, AW979200, |
| | | | | AW069273, BF679169, AW873417, AL523272, |
| | | | | AA568433, AI744890, AI064968, AW022796, |
| | | | | AV762541, AA632355, AI174827, AA610644, |
| | | | | AI798521, BF131490, AA493808, AI312614, |
| | | | | AW836225, AW129188, AA779599, AI148840, |
| | | | | BG059139, AV741384, AI252611, AA834891, |
| | | | | BF882222, BE150831, T26553, BE044000, |
| | | | | AI797998, AL044701, AI733523, AA748071, |
| | | | | AA493464, BE080768, BF680389, AU155456, |
| | | | | AU157188, F25759, AI701898, AW008217, |
| | | | | AA313025, AI751698, W44797, BG259545, |
| | | | | AV734311, AV759022, BF973510, BE974200, |
| | | | | AI819419, AA557945, AL136461, AL031656, |
| | | | | AC023051, AP000344, AC004263, AC002565, |
| | | | | AC005821, AC006318, AC005722, AP000008, |
| | | | | AL096840, AC005881, AC004000, AC006261, |
| | | | | AC007335, AC015550, AC007358, AL133548, |
| | | | | AP000512, AC005291, AC004849, L77570, |
| | | | | AC005069, AC006121, AJ003147, AC002470, |
| | | | | AL133153, AC005071, AL031228, AC018644, |
| | | | | AC003665, AD000812, AL121903, AC005209, |
| | | | | AC007842, AL121712, AC006581, AL022165, |
| | | | | AL031311, AL078477, AC002310, AL353807, |
| | | | | Z98200, AL109797, AC007404, Z83840, |
| | | | | AL050321, AC007637, AL035587, AC009408, |
| | | | | AC012309, AL022336, AL133545, AB023051, |
| | | | | AL117334, U85195, AL159168, AL031659, |
| | | | | AL121886, AC002126, AC006455, AC021016, |
| | | | | AC011475, AL359382, AE000658, AL109952, |
| | | | | AL049780, AL121891, AL109798, AC007055, |
| | | | | AF196779, AC004703, AC010491, AL033529, |
| | | | | AP001435, AC007308, AC011500, Z83844, |
| | | | | AC010422, AC010326, AB042297, AC007540, |
| | | | | D16583, AC021752, AC008773, AL121586, |
| | | | | AC011480, AL021154, AP000704, AL133355, |
| | | | | AL136300, AC006483, AC007878, AC011442, |
| | | | | AL109804, AC005629, AF134726, AL121601, |
| | | | | AC010685, AL445483, AC005399, AJ229041, |
| | | | | AC009087, AL096701, AC010627, AF015722, |
| | | | | AL009181, AC004765, AF205588, AL132855, |
| | | | | AL020997, AL138756, AC010328, AC005484, |
| | | | | AL035455, AC011473, AL133387, AC004859, |
| | | | | AC016594, AC011497, AL049538, AC073898, |
| | | | | AL445263, AL163268, AC006211, AC009123, |
| | | | | AL096775, AC004812, AL135927, AC007227, |
| | | | | AL035089, AC006487, AC005355, AL118506, |
| | | | | AC004752, AP001727, AC018755, AP000049, |
| | | | | AL122020, AL031678, AC007684, AC004821, |
| | | | | AC010271, U91326, AC005900, AL050335, |
| | | | | AC004967, AP00030, AP000212, AP000134, |
| | | | | L44140, AP000311, AC004865, AC005089, |
| | | | | AC002429, AC008044, AC018641, AC006511, |
| | | | | AC008887, AL163301, AC004854, AL096712, |
| | | | | AC011440, AC013436, AC006539, Z84474, |
| | | | | AP000365, AC004462, AC009086, AL391122, |
| | | | | AC005000, AC005251, AL023807, AP000503, |
| | | | | AL031666, AC006345, AL138836, AC020728, |
| | | | | AC008745, AC005052, Z92545, AC002350, |
| | | | | AL137818, AC006001, AC004019, AC020916, |
| | | | | AP001760, AP001711, AC035149, AF015720, |
| | | | | AC007371, AL136124, AL031005, AL121900, |
| | | | | AD000092, AL122001, AL049758, AF225899, |
| | | | | AL133163, AC005049, AC006241, AP000553, |
| | | | | Z82215, AL121655, AC005921, AC007383, |
| | | | | AC005668, AL157384, AC007390, AC009032, |
| | | | | AP001718, AC011559, AC004228, AF312915, |
| | | | | AL365276, AC011479, AC002039, AC008050, |
| | | | | AL135839, AC005971, AC009470, AL035458, |
| | | | | AC008281, Z97630, AC005664, AL022717, |
| | | | | AC007216, AC004971, AC005224, Z98036, |
| | | | | AL133229, AP000689, Z81364, AL133551, |
| | | | | AL138725, AF243527, AP000250, AL031670, |
| | | | | AL139100, AC005175, AC005031, AC003025, |
| | | | | AC006013, AC005500, AC005519, AC017100, |
| | | | | AL135818, AL354943, AC005274, and |
| | | | | AL136171. |
| 65 | HAZCB15 | 175 | 1209801 | AV763460, AW970856, AI890297, AW504667, |
| | | | | AI444575, AA171400, AI254267, AA218684, |
| | | | | BF725436, AW338376, AI754257, AW265468, |
| | | | | AI174703, BF680232, AA084320, BE747923, |
| | | | | BF913232, BE677164, BE882869, BF790866, |
| | | | | AA568303, BE244308, BE875478, AI076729, |
| | | | | AW021674, N26159, BF846619, AI003068, |
| | | | | AV758849, AA765899, AA935827, AW327673, |
| | | | | AI744199, AW575808, AW410844, BF679568, |
| | | | | AW839858, AI753131, AV727766, AW157128, |
| | | | | AW157424, BG180320, AV732057, AV753446, |
| | | | | AI890283, AL121039, AI702049, H24331, |
| | | | | AI828721, AI038029, AI744890, AW960129, |
| | | | | AW085811, AI921744, AW419201, BG059924, |
| | | | | AA618531, AA554289, BF814446, BG109302, |
| | | | | AI860423, AU120423, AW023975, AI281622, |
| | | | | AV712092, BF792103, AW731858, AA507623, |
| | | | | AI572680, AI813920, AI609992, BG259634, |
| | | | | AI889177, AW576388, AU147226, AW148821, |
| | | | | AW474825, AI446618, AA568311, AV731938, |
| | | | | AA601336, AW850985, AI734075, AW979200, |
| | | | | AI734076, AW662484, AW069273, BF971234, |
| | | | | AA493245, AA493808, AI434103, BF724416, |
| | | | | AW873417, AW243817, AW514844, AI567676, |
| | | | | AI538404, BF942991, AV730440, AW963295, |
| | | | | AI745666, AI064968, BF853730, AA568433, |
| | | | | AI174827, AI312267, AW875184, H05066, |
| | | | | AW020682, AL523272, AA493464, AA632355, |
| | | | | AW963552, BF218253, AV741384, AW836225, |
| | | | | AI798521, AW022796, AI797998, AV762541, |
| | | | | AL044701, AI312614, AV743067, AA779599, |
| | | | | AU157188, AW129188, AA610644, AI148840, |
| | | | | BG059139, F25759, BE044000, AA834891, |
| | | | | BE150831, AA723282, AI733523, AA748071, |
| | | | | BE080768, T26553, AU155456, AA557945, |
| | | | | AI571094, BG259545, AA313025, AI701898, |
| | | | | AW008217, AA225392, AI002950, BE974200, |
| | | | | AV759022, BF973510, AW057760, W44797, |
| | | | | BF882222, BF131490, AA809546, AL136461, |
| | | | | AL031656, AC004263, AC004849, AC005069, |
| | | | | AC005881, AC002565, AP000512, AJ003147, |
| | | | | AL050321, AL096840, AC005722, AP000008, |
| | | | | AC005209, AL121601, L77570, AL359382, |
| | | | | AL121903, AL132855, AL133153, AC005071, |
| | | | | AL133387, AC006261, AL121712, AL031311, |
| | | | | AJ229041, AC007637, AL163268, AB042297, |
| | | | | AD000812, Z83840, AC004000, AF015722, |
| | | | | AL138756, AC011500, AC007404, AC002310, |
| | | | | AC007842, AC003665, AL109797, AC012309, |
| | | | | AL133355, Z98200, AL117334, AL354943, |
| | | | | AC002126, AB023051, AC021016, AP001727, |
| | | | | AC004821, AC008773, AL353807, AC009086, |
| | | | | AC007878, AL023807, AL049780, AC018641, |
| | | | | AF196779, AL118506, AL078477, AC011475, |
| | | | | AL035587, AC004859, AC073898, AC007722, |
| | | | | AC009032, AC009087, AL031659, AF134726, |
| | | | | AC010627, AC003025, AC005409, AC005049, |
| | | | | Z98742, AP001435, AL133545, AL035455, |
| | | | | AL096712, AL121900, AL031666, AL121891, |
| | | | | AC006539, AC006483, AF015720, AF139813, |
| | | | | AC004228, AC011473, L44140, AC011559, |
| | | | | AP000704, AL365276, AL033529, AC007308, |
| | | | | AC010326, AL121886, AC004765, Z83844, |
| | | | | AL049653, AC010491, AC007371, AP000365, |
| | | | | AC005484, AL020997, U85195, AF225899, |
| | | | | AC017100, AL096701, AC005500, AC007684, |
| | | | | AC004019, AL050335, Z84474, AC005900, |
| | | | | AC002470, AC006211, AC008745, AC011497, |
| | | | | AE000658, AL136300, AC002429, AL109952, |
| | | | | AL132765, AC002350, AC002039, AC021752, |
| | | | | AL135927, AL137818, AL133289, AC008044, |
| | | | | AL122001, AF165926, AL353771, AF205588, |
| | | | | AC010328, AL139100, AC016594, AL133163, |
| | | | | AL159168, AL031670, AC005522, AL117337, |
| | | | | AL121655, AL354977, AC004462, AL031678, |
| | | | | AC005031, U80017, AC006318, AC005618, |
| | | | | AP000503, AC007731, AP000556, AC004796, |
| | | | | AL163301, AC010685, AL136171, U91326, |
| | | | | AP001760, AC008816, AC023051, AL353748, |
| | | | | AC005971, AL022336, AC006379, AC007227, |
| | | | | AP000553, AC006241, AL109798, AC005822, |
| | | | | AC010789, AC011742, AP000689, AC006970, |
| | | | | AP001711, AL121872, AL162505, AC018755, |
| | | | | AC011490, AC007383, AC004383, AF196971, |
| | | | | AP001725, AL445483, AC005821, AL133551, |
| | | | | AL445189, AC008068, AC005251, AC008521, |
| | | | | AL080317, AC008747, AC010271, AP000350, |
| | | | | AC005365, U91327, AR036572, U91328, |
| | | | | AL356299, AL109935, AC007934, AC004812, |
| | | | | AC008555, AC006160, AL162430, AL049557, |
| | | | | AP001718, AC010422, AF053356, AC005399, |
| | | | | Z15025, AC018644, AC002036, AL121845, |
| | | | | AP000099, AL049694, AL121653, AJ400877, |
| | | | | AL354696, AC010205, AL163246, AP000547, |
| | | | | AC002094, AC006449, AC005355, AC006317, |
| | | | | AL049843, AC008267, AC005632, AC018751, |
| | | | | AF312915, AL450226, Z81450, AP000352, |
| | | | | AC008896, AL355385, AL354720, Z98048, |
| | | | | AL157877, AL137039, AC008760, AC011465, |
| | | | | AL035079, AC005202, AF163864, AB023049, |
| | | | | AC005015, AC006345, AL445263, AL353999, |
| | | | | and AC007055. |
| 66 | HSLFK66 | 76 | 1271609 | D62414, AA181545, D79573, AA641508, |
| | | | | AA669547, AA182437, D79561, T58386, D79571, |
| | | | | D62426, and AA552375. |
| 66 | HSLFK66 | 176 | 1224406 | AV761859, D79520, D62414, AA773146, |
| | | | | AA570549, AA181545, D79573, AA182437, |
| | | | | AA641508, AA962710, AA669547, AA307713, |
| | | | | C16292, D79561, T58386, T51211, T53617, |
| | | | | D79571, D79560, AA164697, D79576, T51316, |
| | | | | D62426, AA164269, AA552375, and Z70707. |
| 67 | HCFPE46 | 77 | 1243901 | BE906104, AA126510, BE676563, AA631935, |
| | | | | AI083764, BE208817, AV655556, AA825589, |
| | | | | AA404716, AI434722, AI144498, AA404589, |
| | | | | AW978956, BF760247, AW835197, AW835198, |
| | | | | BE269425, AI919158, AI656772, AI436732, |
| | | | | AI932739, AI859648, AI524179, AW005157, |
| | | | | AI631651, AI621039, AI561356, BE966927, |
| | | | | AI961414, AI683555, AI433590, AI919500, |
| | | | | AI973104, AI784214, AI453248, AI653664, |
| | | | | BE965093, AI493567, AA761608, BE962390, |
| | | | | AW131282, AI864836, AI828676, AA765198, |
| | | | | AI553645, AW055252, AW072413, AA449768, |
| | | | | AI680221, AI422050, AI763414, AC004643, |
| | | | | AL442083, AF267849, Z97214, AK027095, |
| | | | | I32738, U62966, AL080317, and A59621. |
| 67 | HCFPE46 | 177 | 1223989 | BE906104, AA631935, AA126510, AV655556, |
| | | | | BE676563, AI144498, BE208817, AI083764, |
| | | | | AA404716, AI434722, AA825589, AA404589, |
| | | | | BF760247, AW978956, AW835197, AW835198, |
| | | | | BE269425, BF976690, BF313964, and AC004643. |
| 68 | HNGPB91 | 78 | 1253113 | AI282479, AW514662, AA04009, N23096, |
| | | | | AV691556, AV693536, AV697609, AI360558, |
| | | | | AI821714, AI792133, AI791913, AA857812, |
| | | | | AW105729, H73550, AI821785, AI224619, |
| | | | | AA483606, AA602017, AA916430, AI267356, |
| | | | | AA469230, AA570740, AL041706, AC007011, |
| | | | | AL079342, AC005874, AF134471, AC018642, |
| | | | | AP001711, AL022163, Z84480, AC010519, |
| | | | | AC004865, AL161445, AL022315, AP000030, |
| | | | | AC005544, AC003962, Z98949, AL008719, |
| | | | | AC005527, AL050335, AC005529, AC020728, |
| | | | | AC018719, AC005562, AL109935, AP001725, |
| | | | | AC004659, AL136418, AL355499, AL022316, |
| | | | | AC004971, AC002991, AP000251, AL022330, |
| | | | | AL158823, AC018663, AC004253, AL035072, |
| | | | | AC017100, AC009044, AC006974, AC008812, |
| | | | | AC006515, AC004805, AP001729, AC004638, |
| | | | | AC006241, AL136137, AL096701, AC004816, |
| | | | | AC009783, AP000689, AC007055, AC010618, |
| | | | | AC004032, AL121920, AL034429, AL049870, |
| | | | | AL136228, AL137786, Z77249, AC009511, |
| | | | | AL138741, AL137784, AL049553, AC008149, |
| | | | | AC005015, AL138828, AP000688, AL133238, |
| | | | | AC005047, AC004089, AP001726, AC004778, |
| | | | | AL022336, AC004806, AL009181, AL023807, |
| | | | | L44140, AC006050, AL136300, AC011484, |
| | | | | Z95152, AB003151, AC007193, AC005972, |
| | | | | AL080317, AC009408, AL033529, AP001712, |
| | | | | AC011450, AC004672, AC005486, AF307337, |
| | | | | AC009314, AP000501, AC008474, AC005412, |
| | | | | AC004941, AC005215, AC009079, AC005815, |
| | | | | AC005796, AL096703, AC020913, AC004383, |
| | | | | AL133294, AL031584, AC007057, AC005722, |
| | | | | AC003037, AC000025, AC004139, AP001716, |
| | | | | AP001721, AC006111, AL135901, AP001747, |
| | | | | AL136124, AC007115, AC007161, AC002985, |
| | | | | AC007097, AL109825, AL132775, AL035461, |
| | | | | Z93023, AC005081, AC007285, AL137802, |
| | | | | AC006450, AL354680, AP001724, AC002378, |
| | | | | AL078621, AP000697, AC005659, AC073934, |
| | | | | AC005587, AC007383, AL136979, AC053513, |
| | | | | AF111169, AC016602, AC004973, AC006057, |
| | | | | AL031681, AL135902, AP000014, AC004217, |
| | | | | AC002351, AP000252, AC002990, AP001745, |
| | | | | Z85996, AL160313, AC009803, AC007850, |
| | | | | AC006080, AL080243, AC006329, Z84466, |
| | | | | AL117333, AL133244, AL049832, Z93020, |
| | | | | AC004593, AL133240, AC011811, AL109930, |
| | | | | AC006160, AC019171, AC007912, AL136985, |
| | | | | AC005233, U82671, AC008784, AC010489, |
| | | | | AC004408, AL022323, AL031733, AF001548, |
| | | | | AC004890, Z93929, AC025470, AL008627, |
| | | | | AC008641, AC006958, AP001714, AL121944, |
| | | | | AL031230, AC007298, AC002369, AC007782, |
| | | | | AL136131, AL157377, AC012065, AC004791, |
| | | | | AC010363, AL021155, AC007956, AC007686, |
| | | | | Z95113, AC008806, AC007376, AC002352, |
| | | | | Z97054, and AL135783. |
| 68 | HNGPB91 | 179 | 1045322 | AA744094, BE242452, AA225273, AW574958, |
| | | | | AW572140, AA297670, AC008736, AC011475, |
| | | | | AL022316, AC008521, AC007666, AC087095, |
| | | | | AC016831, AC004491, AC025275, Z97054, |
| | | | | AC004846, AC008812, AC007000, AL109935, |
| | | | | AC020552, AL031662, AC004824, AC005041, |
| | | | | AC013434, AC009948, AC006530, Z97630, |
| | | | | AC005081, AC007707, AC005730, AL354720, |
| | | | | AL158040, AP000036, Z99716, AL049776, |
| | | | | AC006088, AC006023, AL049780, AC004821, |
| | | | | AP000555, AL024498, AF190464, AC005291, |
| | | | | AL080243, AL008723, AL049872, AL157372, |
| | | | | AC004797, AC000353, AC007193, AC006285, |
| | | | | AL121936, AP001717, AL049840, AC005899, |
| | | | | AC078854, AC005231, AF195658, AC010326, |
| | | | | AC005071, AL008718, AC005015, AC011442, |
| | | | | AC022201, AC002425, AL035072, AC004975, |
| | | | | AC011470, AL117336, AC007546, AL022315, |
| | | | | AC020916, AC008641, AC002550, AL133215, |
| | | | | AC004876, AL031584, AC011811, AC007435, |
| | | | | AC008543, AC010422, AC018801, AC005089, |
| | | | | AC018719, AL109824, AL121897, U47924, |
| | | | | AC023105, AL117378, AC008277, AL022323, |
| | | | | AP001711, AP000347, AL133246, AC008795, |
| | | | | AL157827, AL356652, AL121578, AC006483, |
| | | | | AC018644, AC002306, AL162430, AC008753, |
| | | | | AC006539, AL121983, AL080249, AL136418, |
| | | | | AC004965, AC020913, AC004754, AC010510, |
| | | | | AC005803, AC009600, AC006064, AC005355, |
| | | | | AC008745, AC020750, AP001725, AL354942, |
| | | | | AF111168, AL133163, AC004099, AC007956, |
| | | | | AC011500, AC006141, Z84480, AL020997, |
| | | | | AL121920, AC008569, AL022163, AL031005, |
| | | | | AC006449, AL035659, AF001549, AC007371, |
| | | | | AC000052, AC004477, AL031660, AC002351, |
| | | | | AC005846, U80017, AL138759, AL035249, |
| | | | | AC006116, AL135927, AC007227, AC020898, |
| | | | | AC010412, AL096701, AC005245, AC008770, |
| | | | | AL121586, AL163247, AC004024, AC010328, |
| | | | | AC009311, AC004655, AP00122, AP000054, |
| | | | | AP000169, AC010489, AC011462, and |
| | | | | AC005527. |
| 69 | HRADV31 | 79 | 1275159 | BE616483, BE614781, BG167480, BE160498, |
| | | | | BE160502, BE160500, N30135, BE160501, |
| | | | | BE160497, AI767701, AI633623, AI140698, |
| | | | | AW269969, N34283, AA610009, AA535713, |
| | | | | AA904500, AA135305, AW043844, AW168046, |
| | | | | AI271558, T65377, AA830555, AA779492, |
| | | | | D29317, N51615, AW168340, R42844, |
| | | | | AW149189, AA910171, AA679759, AI262864, |
| | | | | H20852, AA096462, T77049, T51392, H22970, |
| | | | | H08110, AA370573, AA136386, AW592312, |
| | | | | F09407, R40094, T15987, T35272, AI470445, |
| | | | | N72424, AA361165, H08109, BF840352, H20903, |
| | | | | R21459, H22760, R14782, T65454, F11747, and |
| | | | | AL117635. |
| 69 | HRADV31 | 180 | 1209606 | BE160502, BE160498, BE160500, BE160501, |
| | | | | BE160497, AA096462, T51392, AA370573, and |
| | | | | N72424. |
| 69 | HRADV31 | 181 | 1046790 | BG167480, BE616483, BE614781, N30135, |
| | | | | AI767701, AI633623, AI140698, AW269969, |
| | | | | N34283, AA610009, AA535713, T65377, |
| | | | | AA904500, AA135305, AW043844, AI271558, |
| | | | | AW168046, AA830555, AA779492, N51615, |
| | | | | D29317, AW168340, R42844, AW149189, |
| | | | | AA910171, AA679759, AI262864, H20852, |
| | | | | T77049, H22970, H08110, AA136386, AW592312, |
| | | | | F09407, R40094, T15987, T35272, AI470445, |
| | | | | AA361165, H08109, H20903, R21459, H22760, |
| | | | | R14782, T65454, F11747, and AL117635. |
| 70 | HNBVG70 | 80 | 1243889 | BF341007, BF110353, AI498144, AI452515, |
| | | | | AW269396, AW052151, AI418007, AI799477, |
| | | | | AI689745, AI742906, AI624831, AI671017, |
| | | | | BE220286, AW243321, AW269568, AW016809, |
| | | | | AI819941, BE220815, BE328187, AI909029, |
| | | | | AI910872, AI369619, AI214589, AI912142, |
| | | | | AW663724, AI796721, AI913870, AA936264, |
| | | | | AW882471, AW474263, T71999, AA988210, |
| | | | | AI655881, AI474210, T67045, AI383567, H42725, |
| | | | | T65399, T87843, C20646, T67046, R07577, |
| | | | | H42757, W27492, Z39615, AA718920, R45981, |
| | | | | H83823, F11115, R46490, Z43546, and |
| | | | | AL109976. |
| 70 | HNBVG70 | 182 | 1225912 | BF341007, AI498144, BF110353, AI452515, |
| | | | | AW269396, AW052151, AI418007, AI799477, |
| | | | | AI689745, AI742906, AI624831, AI671017, |
| | | | | BE220286, AW243321, AW016809, AW269568, |
| | | | | AI819941, BE220815, BE328187, AI910872, |
| | | | | AI909029, AI214589, AI369619, AI912142, |
| | | | | AW663724, AI796721, AI913870, AA936264, |
| | | | | Z43546, AW882471, AW474263, T17017, T71999, |
| | | | | AA988210, BE275875, AI655881, R07576, |
| | | | | AI474210, T67045, AI383567, T08597, T65475, |
| | | | | H42725, T65399, F13536, T87843, C20646, |
| | | | | T67046, R07577, H42757, W27492, Z39615, |
| | | | | F08143, AA718920, R45981, AW954424, H83823, |
| | | | | AA377421, F11115, R46490, BF816811, |
| | | | | AI340603, AW827206, AI284517, AA420722, |
| | | | | AL036274, BE965758, BE964636, BE964876, |
| | | | | BF914297, AA572758, BE909398, BE874133, |
| | | | | AI537677, BE966011, AV710950, BE885490, |
| | | | | AA259207, BE966787, BE887488, AI312152, |
| | | | | AL119836, BF885675, BE886728, AI345735, |
| | | | | AI312428, AW075084, AI950664, BF872670, |
| | | | | AI349937, BE172767, AW089572, AI348897, |
| | | | | AI307708, AI500659, AL036802, AI349598, |
| | | | | AW068845, AI612885, AL514793, AI340627, |
| | | | | AI445237, BE172412, AW151138, AW059713, |
| | | | | BF344201, BF856052, BG114104, AA176980, |
| | | | | AI918435, AL039086, BE965192, AI702073, |
| | | | | BE963918, BE904051, BG252929, AI366549, |
| | | | | AI636719, AI539153, BF818009, BE904178, |
| | | | | BE964767, BF812961, BE894455, BE964614, |
| | | | | BE964661, AI539771, AA974049, BF032768, |
| | | | | AW403717, AW827289, BE895585, AL036396, |
| | | | | AL042365, AI349933, BE877769, AL038605, |
| | | | | AI866608, BE964700, AI340519, BF904194, |
| | | | | BG178809, AI471909, BE875407, BF990167, |
| | | | | BE047952, BE885048, BE881089, AI589993, |
| | | | | BE965355, BE965556, AI753683, BF909758, |
| | | | | AW806761, BF792378, AA804740, AI500523, |
| | | | | BF812438, BF885000, BG113299, BE965432, |
| | | | | BF766536, AI500706, AI754897, AI491776, |
| | | | | BE965599, BF814412, AI349226, BF915536, |
| | | | | BE965121, AI567612, AI633125, AI815232, |
| | | | | BE965481, AI521560, H14460, AW813006, |
| | | | | AA493647, AW673679, AI334884, BF343764, |
| | | | | AI349957, AA579232, BF904177, AI801325, |
| | | | | BF038131, AI500662, AI432570, AW020693, |
| | | | | AW268253, AI862144, BF884999, AI349256, |
| | | | | BE965307, BE011880, BG257535, BE963838, |
| | | | | AW161579, BG105895, AI343059, AI433157, |
| | | | | AI537837, AA136379, BE965621, BE621256, |
| | | | | AV738991, BF343568, BF672397, AI267502, |
| | | | | BE541445, BF904180, AL037454, BF038804, |
| | | | | AL045500, BE965724, AA287231, BE969227, |
| | | | | N33175, AI309401, AI249946, BF344691, |
| | | | | AV733374, AI521005, AI866573, BE138658, |
| | | | | N42321, AI446373, AI312399, BE880426, |
| | | | | W73005, AI307543, AI345224, AI340659, |
| | | | | AI344935, BF345043, AI345005, AI313352, |
| | | | | BE965067, BE544111, AI805638, BF814453, |
| | | | | AW118508, AW073898, AI472536, AL048656, |
| | | | | AI583578, AL038564, AL515047, AL109976, |
| | | | | A08916, I48978, I89947, I89931, A08913, A08910, |
| | | | | I68732, AF218033, AB049887, AL137283, |
| | | | | AF119875, I48979, AC016652, AF102578, |
| | | | | AK000212, AL049938, AC004686, AK026648, |
| | | | | AF116644, S78214, A08912, AL137294, |
| | | | | AL117457, AJ010277, AK026624, AF061573, |
| | | | | AB051158, AL035458, AK026590, AK026045, |
| | | | | AL133560, AF208850, AB048974, AK025084, |
| | | | | X72889, AB050510, AK000618, AR068466, |
| | | | | U00763, AL049452, AF132205, S77771, E02349, |
| | | | | AX019230, AK026855, A18777, A08909, |
| | | | | AL359601, AK026542, AF113013, AF113691, |
| | | | | AB049758, AF130059, AF116631, A57389, |
| | | | | A08908, AL359623, AL096728, I03321, |
| | | | | AK026608, AF130082, AF116682, AB019565, |
| | | | | AC010137, AF314091, AF078844, AF113699, |
| | | | | AL050277, AF116639, AL133077, AF116691, |
| | | | | AL122121, AF113694, AF091084, AF113690, |
| | | | | AF105427, AB050411, AK025339, AL161953, |
| | | | | AK026927, AL137658, AF113677, AL049466, |
| | | | | E15569, AL096744, AF175983, AF260566, |
| | | | | AF090943, AL050146, AF177401, AL137557, |
| | | | | AL442082, E02253, AK026597, AB047887, |
| | | | | AB046642, U66274, AR079011, AR079012, |
| | | | | AX046405, Y11254, AK026600, AB047615, |
| | | | | AJ250403, AL359618, X82434, AF090903, |
| | | | | AF030635, X83544, AL050149, AK026522, |
| | | | | E12579, AF110640, AL049314, AF130105, |
| | | | | AF114784, D00174, AK027142, AF085809, |
| | | | | AF111851, AL110196, AK026526, AL133080, |
| | | | | AK026744, AF207829, AK026442, AK025410, |
| | | | | AL137459, AB048954, AX016706, AJ242859, |
| | | | | AL133640, AK026647, AF217987, AL390167, |
| | | | | AK025798, AB048995, AL137529, AL035587, |
| | | | | AL117460, AL080124, AL389935, AL133565, |
| | | | | AF321617, AC005231, AF116602, AF219137, |
| | | | | AK026865, AF130104, AC010605, AL359941, |
| | | | | AL080060, S63521, AF119878, AR079032, |
| | | | | AF116646, AL137550, AK025484, AL080137, |
| | | | | AF125948, AF125949, AJ000937, AF057300, |
| | | | | AF057299, AF104032, AB034701, L31396, |
| | | | | AL354776, AK000486, AF113019, A08907, |
| | | | | E07108, AF111847, AL442072, AL162083, |
| | | | | AF116688, AF207750, E03348, AL110225, |
| | | | | AK026598, AF090934, AB052200, AL050172, |
| | | | | AF113689, AK000421, AL117394, Y16645, |
| | | | | I89934, AK027096, AL122093, AR087170, |
| | | | | AC020956, AF119899, AF118064, AL050108, |
| | | | | AC024247, AF242189, AL133093, AX046603, |
| | | | | AF003737, AB048964, AL389978, AB048953, |
| | | | | Y11587, AB050418, AF200416, AF143723, |
| | | | | AF217973, L30117, AL442083, AF118070, |
| | | | | AL122050, AF143957, AB041801, U42766, |
| | | | | AR038854, AL133606, AF218014, AK026741, |
| | | | | L31397, X63574, AK000137, AK025378, |
| | | | | AK024538, AL049300, AF225424, AL137478, |
| | | | | AR068753, E12580, AL353957, AK026571, |
| | | | | AF017152, M27260, AK000310, AL133029, |
| | | | | AK026924, AL359596, AF081571, E02221, |
| | | | | AF119909, AB030279, AK025958, AL354861, |
| | | | | A08911, AF090901, AL136842, and AL133075. |
| 71 | HCFGK19 | 81 | 1253156 | AL041924, AV756491, BG029528, BF854308, |
| | | | | BF854244, AF246229, AW504485, BF725844, |
| | | | | AI085242, AV762633, BE062476, AI887235, |
| | | | | BF678990, BF681619, AA760655, T74524, |
| | | | | AV761107, AI272052, AW969667, BF946053, |
| | | | | AV760019, BE674881, AV742175, AW500684, |
| | | | | BF868994, AV682003, AI755214, BG115297, |
| | | | | BE147075, AW468009, BF805088, AV759972, |
| | | | | AI754567, AV758870, AW088846, AW963463, |
| | | | | AI623720, AW023111, AA502532, AW969831, |
| | | | | BF879045, AW402784, AW970940, AA515048, |
| | | | | AL135357, AI733856, H07953, AW576251, |
| | | | | AA833875, AA833896, AW872736, BE158716, |
| | | | | AL042667, AL042670, AV760391, AW013790, |
| | | | | AI310787, BF965290, AI609972, AI963720, |
| | | | | AI859946, AW969743, AI282479, BF917346, |
| | | | | AW270258, AV711465, AV763550, AW327624, |
| | | | | AW328446, AV760389, AL138455, AA536040, |
| | | | | U95743, AC005592, AR036572, U91328, |
| | | | | AL035667, AF205588, AL136501, AC066585, |
| | | | | AP001705, AC008569, AL034372, AL117337, |
| | | | | AC002554, AC009530, AL161449, AC004824, |
| | | | | AC005052, AL135783, AC011890, Z82194, |
| | | | | AL137795, AC005874, AF134471, AC008134, |
| | | | | AC016396, AC002492, AL138726, AL138478, |
| | | | | AP001671, AC009087, AP001694, AL031311, |
| | | | | AL096703, AC006211, AC005273, AF186190, |
| | | | | AL031230, AC009405, AL109804, Z84483, |
| | | | | AL353804, AC016751, AL133467, AL121890, |
| | | | | AL132657, AL133376, AC008079, AL035555, |
| | | | | AC009784, U95739, AP001748, AL034351, |
| | | | | ALP001688, AL135927, AC007227, AC003982, |
| | | | | AC004466, AL138752, AP001631, AC034242, |
| | | | | AL118501, AL096870, AL356057, AL121970, |
| | | | | AC005534, AC005406, AP001713, AL022396, |
| | | | | AC008249, AL133405, AL034371, AC008119, |
| | | | | AL133372, AC004832, AL356010, AC007283, |
| | | | | AC006390, AC068799, AC034194, AL121936, |
| | | | | AL163246, AL121932, AC002394, AL023877, |
| | | | | AC007226, AC010206, AC010598, AC006994, |
| | | | | AL031229, AP001610, AC009247, AL163267, |
| | | | | AL031658, AC018697, AC004166, AC005940, |
| | | | | AC002457, AC008101, AC024084, AC006038, |
| | | | | AC007536, AL096840, AC002565, AP000245, |
| | | | | AL133325, AL137022, AC005261, AC011497, |
| | | | | AC005231, AC009947, AC053513, Z97181, |
| | | | | AC006991, AC012467, AP001743, AC006150, |
| | | | | AL121586, AL050335, AL031659, AL137060, |
| | | | | AL359763, AL031281, AC004448, AC009196, |
| | | | | AC012502, AL021393, AC004130, AC020908, |
| | | | | AC018682, AF111167, AF165175, AC023490, |
| | | | | AL137061, AC007739, AL359846, AC009506, |
| | | | | AL136303, AC002316, AL049779, AF243527, |
| | | | | AF168787, AL353580, AC004491, AL109935, |
| | | | | Z98304, AL137026, AL133244, AC007248, |
| | | | | AL391839, AC004414, AC007365, AC006077, |
| | | | | AC009116, Z83840, AC007282, AP001716, |
| | | | | AC007707, AL109624, AC007390, AC083866, |
| | | | | AC007324, AL133445, AC005200, U29185, |
| | | | | Z82214, AP000552, U89335, AL050309, |
| | | | | AL031118, AP000556, AL117694, AC006059, |
| | | | | AC003044, AC002331, AL031432, AL118520, |
| | | | | AL031767, AL391259, AC005661, AL445207, |
| | | | | AC019171, AC005690, AL034420, AL136985, |
| | | | | AL049757, Z82182, AC007395, AC008738, |
| | | | | AP000355, AP000036, AP000240, AL136228, |
| | | | | AL162724, AC013436, AC087225, U82828, |
| | | | | AC005098, AL137012, AC021068, AP001711, |
| | | | | AP000501, AL049539, AF235098, AC007172, |
| | | | | AC010609, AC006061, AL031003, AL035467, |
| | | | | AC018644, AL354864, AC007055, Z99755, |
| | | | | AC007597, AC079844, AL049690, AC020754, |
| | | | | AP000553, AP000263, AC007298, AL139378, |
| | | | | AC024082, AC008760, Z85986, AL138741, |
| | | | | AF042484, AC019099, AC006013, AC005233, |
| | | | | AL133448, AC004895, AC012318, AL136300, |
| | | | | AL109623, AL136097, AC007383, AL353812, |
| | | | | AC002302, AC007542, AC024561, AC007993, |
| | | | | AC005486, AL359204, AL137145, AL121652, |
| | | | | AC006111, and AC002347. |
| 71 | HCFGK19 | 183 | 1213458 | AW839310. |
| 72 | HNGOG04 | 82 | 1243925 | AC009492. |
| 72 | HNGOG04 | 184 | 1212831 | AC009492. |
| 73 | HDCGC29 | 83 | 1253157 | BG105848, BG035441, AL162212, and |
| | | | | AC005081. |
| 73 | HDCGC29 | 185 | 1210197 | BG030548, AI620284, BG163623, BG035441, |
| | | | | BG034001, BG250790, BG122005, BG031205, |
| | | | | BG178197, BG164994, BG105848, BG260144, |
| | | | | BF971016, and AC005081. |
| 74 | HNGNT27 | 84 | 1261927 | AW975169, AW245747, AL044340, AI537133, |
| | | | | AI821467, BE063437, AW303196, AV682003, |
| | | | | AW301350, AL037632, AI613389, AW020094, |
| | | | | AW274349, AW021399, BF347791, BF347740, |
| | | | | AI133029, AI719550, AI821596, T50676, |
| | | | | BG029528, AA912287, AL046746, AV760019, |
| | | | | AI334443, AA720774, AF001548, AC011540, |
| | | | | AC004824, AC016995, U91323, AC008745, |
| | | | | AL355392, AC008764, AL353807, AC018751, |
| | | | | AC005261, AC011475, AC004659, AC006511, |
| | | | | AC005620, AC022148, AC002044, AC009516, |
| | | | | AC006483, AC009086, AC005190, AC007249, |
| | | | | AC004966, AL049569, AC005015, AP000558, |
| | | | | AC004520, AF111167, AP001053, U91321, |
| | | | | Z86090, AL117381, AL035684, AC073934, |
| | | | | AC002563, AC005295, AC008925, AL354720, |
| | | | | AC004382, AC008812, AL049636, AL133153, |
| | | | | AC011455, AL109801, AC003109, AC010463, |
| | | | | AL023575, AL162458, AF317635, U85195, |
| | | | | Z82976, AL031681, AC027319, AC005696, |
| | | | | AL078581, AC007676, AL136223, AP000240, |
| | | | | AC009123, AC005057, AE000658, AC022336, |
| | | | | AC003108, AC008569, AC005944, AP001694, |
| | | | | AF312915, AL031283, AC004134, AL022238, |
| | | | | AP000692, AC004655, AL139331, AC020906, |
| | | | | Z84466, U91326, AC002558, AC027644, |
| | | | | AC021016, AC005091, AC005722, AL049611, |
| | | | | AL109935, AC016637, AC004867, AC007782, |
| | | | | AC009247, AC007358, AL031311, AC004890, |
| | | | | AC006330, AC005632, AL050349, AL121583, |
| | | | | AP001726, AF168787, AC006088, Z93017, |
| | | | | AL022165, AC002300, AL035455, AC006238, |
| | | | | Z97054, AC006050, AL031659, AL161670, |
| | | | | AC009032, AC005544, AC008403, Z92542, |
| | | | | AC004883, AC004821, AL121601, AP000344, |
| | | | | AC004813, AC011445, AC008072, AC006120, |
| | | | | AL031005, AC007384, AP001705, AC005003, |
| | | | | AC007114, AL121658, AL138752, AL139396, |
| | | | | AL117341, AP000696, AC009311, AC004386, |
| | | | | AL023583, AC008753, AC005332, AP000695, |
| | | | | AC005839, AC005914, AC008848, Z95118, |
| | | | | AC004985, AL109804, AC011497, AC020904, |
| | | | | AC005519, AP001760, AC005932, AC010489, |
| | | | | AC002470, AL009031, AC011500, AL158830, |
| | | | | AC002326, U47924, AC007450, AC008395, |
| | | | | AL096712, Z99297, AP000117, AL109984, |
| | | | | AC067969, AC008543, AC010553, Z98044, |
| | | | | AC005859, AC010326, AL109965, AC018764, |
| | | | | AC009244, AL139353, AP000553, AC002404, |
| | | | | AC004878, AL118506, AC010289, Z98036, |
| | | | | AC004965, AL132653, AL078604, AC002996, |
| | | | | AC011811, AL031295, AC018663, AC002352, |
| | | | | AL133245, AC005412, AC020916, AL163280, |
| | | | | Z95116, Z84487, AL049795, AC012442, |
| | | | | AC004685, AC004216, AC007000, AC005288, |
| | | | | AC005778, AL023494, AC004859, D88270, |
| | | | | AC004815, U62293, AL121928, AL096702, |
| | | | | AL121891, AC005274, AL022323, AC007878, |
| | | | | AC010605, and AL121890. |
| 74 | HNGNT27 | 186 | 1213013 | AF001548. |
| 75 | HMUHD72 | 85 | 1281806 | AL519919, AL523154, AL519918, BE734820, |
| | | | | BE732499, BE734653, BE900311, AV757051, |
| | | | | BG111889, BE298114, BF309539, BF797896, |
| | | | | BE264515, BF310702, BE797906, BF345540, |
| | | | | BF316978, BF309258, BE540917, BF668006, |
| | | | | AI792617, BF182982, BF205381, BE278367, |
| | | | | AI191836, BE245875, BE386622, AA135424, |
| | | | | AI498523, AA135365, BE047447, AA181172, |
| | | | | AW207238, AA844494, N32956, AA258554, |
| | | | | AA227937, AA156501, BF736383, AI479729, |
| | | | | AI829031, BE247361, BE247344, T33685, |
| | | | | AA805430, N26459, BE769477, BF851311, |
| | | | | AW952916, T06623, BE019484, AA342922, |
| | | | | AV761083, N42628, AI470485, AA135245, |
| | | | | AW449207, AA258607, AA431536, AA181171, |
| | | | | BE246491, AI886936, AI758360, AA815057, |
| | | | | AA431214, T97097, BF850169, BF847837, |
| | | | | T85419, T96984, AA137155, T83965, BE245574, |
| | | | | BF683313, BE246931, AI308955, AL535244, |
| | | | | AW964672, BF849496, AA156166, BF346400, |
| | | | | T35739, BF847823, BF207185, BE242136, |
| | | | | AA255523, AA381753, AA034508, BF058660, |
| | | | | R56363, AA504226, BE246526, AV652257, |
| | | | | BF759906, AW292747, BF746750, AV649969, |
| | | | | AA256708, D50931, and AC005740. |
| 75 | HMUHD72 | 187 | 1209710 | AL519919, AL523154, BE734820, BE734653, |
| | | | | BE732499, BE900311, BG111889, BE264515, |
| | | | | BE298114, AV761083, BF309539, BF797896, |
| | | | | AL535244, BF310702, BF345540, BE797906, |
| | | | | BF316978, BF205381, BE278367, BF182982, |
| | | | | BF309258, BE540917, AI792617, BF207185, |
| | | | | BE386622, BE247361, BE247344, AI191836, |
| | | | | R56363, AV652257, AA683257, T33685, |
| | | | | BE246526, BF851311, N26459, BE246491, |
| | | | | BE769477, T06623, AA305268, BE019484, |
| | | | | BF850169, AA135245, AV652223, BE245574, |
| | | | | D59427, BF847837, BF683313, AA137155, |
| | | | | AL523153, BE246931, BF847823, AW964672, |
| | | | | T35739, AA381753, AV649969, BF849496, |
| | | | | BE245875, BF810571, BE242136, AA353958, |
| | | | | BF346400, AA156166, AA181171, BF835889, |
| | | | | BF058660, AA504226, BF209123, AA090078, |
| | | | | AW292747, AA931847, AA496208, BF746750, |
| | | | | AW884429, D50931, and AC005740. |
| 76 | HLYCK47 | 86 | 1272921 | AI300176, BF339231, N32601, BF526118, |
| | | | | AA894528, AI193100, AI749282, AI200645, |
| | | | | AA917673, AA577400, AW001112, AI687717, |
| | | | | AA703086, AI342526, AI561024, AI141075, |
| | | | | AA922077, AW953836, AI274361, AI184968, |
| | | | | AA922163, W92736, AI815092, BF821354, |
| | | | | AI682589, AW000838, BF879161, BF878968, |
| | | | | AI283829, AI346224, AI718510, BF821349, |
| | | | | N38801, AA443822, AW966426, AA609464, |
| | | | | AI285277, BG060138, AA827271, AI274203, |
| | | | | AI278912, BF879241, AA485613, AI811138, |
| | | | | AI291153, AI598054, AW515183, C17007, |
| | | | | AA954441, BF525949, AI272748, T95291, |
| | | | | AA508675, AW858976, AI582743, AI304507, |
| | | | | BF343049, BF823040, BF342466, R71353, |
| | | | | W92820, R47872, AI749077, AI523358, |
| | | | | AA025765, R47871, AW953891, AI459266, |
| | | | | AI352318, AW629891, H66689, R66274, |
| | | | | AI873364, H78056, T27046, H90673, BF737942, |
| | | | | AI336608, AV689909, H64116, T72087, T95371, |
| | | | | AA383872, R24350, H42114, AI749260, |
| | | | | BF087543, AA025953, AW135690, BF820542, |
| | | | | H66699, BG012708, D31533, H64951, BE769806, |
| | | | | AA368991, N69227, R72785, BE769826, H01871, |
| | | | | R62666, BF349116, R72786, N90491, H89819, |
| | | | | N45434, AW374237, AW029317, H01130, |
| | | | | T16823, AA295668, BF821339, BE140683, |
| | | | | AW277068, AI872250, AI088641, H78057, |
| | | | | H73228, AW374232, BF881707, AW610099, |
| | | | | R24669, AI202813, H26462, T23681, H27838, |
| | | | | AA371827, H64952, BE769808, H70128, R43349, |
| | | | | AA640081, N47826, AI281745, T72232, H83150, |
| | | | | BF991147, AI476021, AW953834, AW605902, |
| | | | | BF920649, AW105588, AW085673, AW082623, |
| | | | | BE011964, AI281707, R17629, AI628316, H27773, |
| | | | | AI925156, AW087534, AW083175, AW188539, |
| | | | | AI697188, AI420521, AI621209, AI859429, |
| | | | | BF812938, AI632033, AI874109, AW075413, |
| | | | | AA833760, AI251434, AI635478, AI684036, |
| | | | | BG121959, AI566003, AI571861, AI824648, |
| | | | | BE965053, AI569945, AI669609, AI828818, |
| | | | | AL513817, AI680435, AI653541, AI554821, |
| | | | | AI572787, AL514409, AI475134, AW087160, |
| | | | | AI912434, AA449768, AW079654, AI923357, |
| | | | | AI587056, AI654672, AI249962, BE964078, |
| | | | | AI273964, AI824764, AI564426, AI817552, |
| | | | | BE966259, AW084786, AL359615, AF155148, |
| | | | | AK026630, AF218034, AL162083, AB044560, |
| | | | | AF026008, Z82022, AF119857, AK000083, |
| | | | | AL133606, AL117435, AK026651, AL110225, |
| | | | | AL035458, AF177401, AF130059, AK026480, |
| | | | | X96540, AL137479, AK026647, A08916, |
| | | | | AX005848, AX005804, AK026434, AK026629, |
| | | | | AF116644, AK026947, AL137459, AB034701, |
| | | | | A08910, A08909, AL137560, A93350, AX010492, |
| | | | | Y10936, I89947, AF017437, AK025239, I48978, |
| | | | | AF090943, A08913, AL049464, AF113019, |
| | | | | I33392, X83508, AB052191, AF113694, |
| | | | | AF116688, AL137271, E02349, AR079032, |
| | | | | L31396, L31397, I89931, AL050149, AK000690, |
| | | | | AL049314, AL359620, AR087170, AF113699, |
| | | | | I03321, AK000344, AK024538, AL050108, |
| | | | | AR068753, AB048964, Y11587, AL050024, |
| | | | | AF119860, AF130075, E15569, AK027114, |
| | | | | AK026583, AK025339, AK000310, AF126247, |
| | | | | AF218014, AL390154, AL137523, AL162006, |
| | | | | AK025431, AF130077, AK026542, AF119875, |
| | | | | AF119899, AL137521, AF124728, AF061943, |
| | | | | AF195092, AF081197, AR038854, AL133098, |
| | | | | Y16645, AL122050, AL162062, AK025573, |
| | | | | AK026624, AL117457, AK025708, AB038698, |
| | | | | U42766, AB049892, AL122110, AK025857, |
| | | | | AK000618, Y07905, AL049466, AL137648, |
| | | | | AK026526, AF242189, AF090903, A08912, |
| | | | | S77771, AK000391, AK026857, AL137527, |
| | | | | AB047631, AL162004, AF314091, AF116639, |
| | | | | AX040958, AL162008, AL133080, AF130087, |
| | | | | AL442082, AF056191, E02221, AK026600, |
| | | | | AF138861, AF091084, AF078844, Y13350, |
| | | | | AK026353, AB047615, AK026649, AK026045, |
| | | | | AF118090, AL117585, AL137529, AK026927, |
| | | | | AF116682, AL050146, AF090896, AK025798, |
| | | | | AF207829, AF116602, AF113690, AF090900, |
| | | | | X70685, AK025092, AL133557, AK000323, |
| | | | | U00763, S83440, AL442072, AL117394, |
| | | | | AF116631, AK026534, A21103, AK027121, |
| | | | | Y11254, AK026959, AB044547, AL389939, |
| | | | | AL162002, AK027096, A08908, AJ000937, |
| | | | | AB047887, AL049430, AF119865, AB048919, |
| | | | | AL359623, AF111851, AF176651, AB048954, |
| | | | | AL133016, AK027142, AK026506, AL355701, |
| | | | | A03736, AL137480, AF130082, AF106862, |
| | | | | AF116650, AB051158, AL122049, U67958, |
| | | | | AB033881, AX019230, AJ242859, I17767, |
| | | | | AL137538, AL133665, AF125948, I66342, |
| | | | | AK027116, AF116691, AL050277, AF119894, |
| | | | | AL031346, I09360, AF097996, AK025906, |
| | | | | AK026741, AK025491, E07108, AB052200, |
| | | | | U72620, AF111847, AX027129, AF130110, |
| | | | | AL122121, S78214, AK000486, AL133560, |
| | | | | AB019565, AL137429, AF100931, AL137283, |
| | | | | AL137557, AL049283, AK000445, AF116610, |
| | | | | AF087943, AB050510, AL049382, AL133640, |
| | | | | AF119909, AF110640, AK026855, AK000212, |
| | | | | AK025435, AK027200, AB024524, AB049758, |
| | | | | AL096744, AF260566, AF146568, and AL122118. |
| 76 | HLYCK47 | 188 | 1221159 | BF343049, BF525949, BF339231, BF342466, |
| | | | | AI300176, AI193100, N32601, AW953836, |
| | | | | AA894528, AA917673, BF526118, AI200645, |
| | | | | AA577400, AW001112, AI687717, AI141075, |
| | | | | AI342526, AI749282, AA922077, AA703086, |
| | | | | AA922163, AI184968, W92736, BF821354, |
| | | | | BF879161, AI274361, AW629891, BF878968, |
| | | | | BG060138, AI682589, AI598054, AA443822, |
| | | | | AW966426, AI346224, AI283829, AA827271, |
| | | | | AI561024, AA609464, BF821349, BF879241, |
| | | | | AI285277, C17007, AI523358, AI582743, |
| | | | | AI274203, AI278912, AW000838, AW953891, |
| | | | | AI811138, T95291, AA485613, AI815092, |
| | | | | AA954441, AI718510, AI272748, BF823040, |
| | | | | AI304507, N38801, AW858976, AI291153, |
| | | | | H90673, W92820, R71353, R47872, AA508675, |
| | | | | R47871, H64116, T27046, R66274, AI352318, |
| | | | | AI749077, AV689909, AA025765, H78056, |
| | | | | AW515183, AI873364, AA640081, H66699, |
| | | | | H66689, R24350, H42114, T95371, BF737942, |
| | | | | BF087543, T72087, AI459266, AA025953, |
| | | | | AI336608, BF820542, AA383872, H64951, |
| | | | | BG012708, D31533, R72785, H01871, BE769806, |
| | | | | AI749260, H89819, H64952, BE769826, R72786, |
| | | | | BF349116, R62666, AA368991, H01130, N45434, |
| | | | | AA371827, AW374237, H73228, N90491, |
| | | | | AA295668, N69227, BE140683, AW135690, |
| | | | | AW374232, BF881707, AW610099, T16823, |
| | | | | H26462, AW953834, R24669, BF821339, H27838, |
| | | | | H78057, AI088641, T23681, BE769808, H70128, |
| | | | | N47826, H83150, AW277068, AI281745, R43349, |
| | | | | T72232, AI202813, BF991147, AW605902, |
| | | | | BF920649, BE011964, AW105588, R17629, |
| | | | | AA835433, H27773, and AI281707. |
| 76 | HLYCK47 | 189 | 1221167 | BF343049, BF525949, AI300176, BF342466, |
| | | | | BF526118, AW953836, N32601, AA894528, |
| | | | | AI193100, AI749282, AA577400, AI200645, |
| | | | | AA917673, AW001112, AA703086, AI687717, |
| | | | | AI342526, AI561024, BF339231, AI141075, |
| | | | | AA922077, AW629891, AI274361, AI184968, |
| | | | | AA922163, BF821354, BF821349, W92736, |
| | | | | AI815092, AI682589, AW000838, BF879161, |
| | | | | BF878968, AI346224, AI718510, AI283829, |
| | | | | N38801, AW966426, AA443822, AA609464, |
| | | | | C17007, AI285277, BG060138, AA827271, |
| | | | | AW953891, AI274203, AA485613, AI278912, |
| | | | | BF879241, AI811138, AI291153, AI598054, |
| | | | | AA954441, AW515183, AI272748, T95291, |
| | | | | AI304507, AA508675, AW858976, AI582743, |
| | | | | BF823040, R47871, R71353, AV689909, W92820, |
| | | | | AA640081, R47872, AI749077, AI523358, |
| | | | | AA025765, AI459266, T27046, AI352318, |
| | | | | H66689, R66274, H78056, AI873364, H90673, |
| | | | | H64116, H42114, AI336608, T95371, AA383872, |
| | | | | R24350, AI749260, BF087543, T72087, |
| | | | | AW029317, AA025953, AW135690, BF820542, |
| | | | | BF737942, AA371827, N90491, H66699, |
| | | | | BG012708, H64951, D31533, BE769806, |
| | | | | AA368991, H01130, N69227, H01871, H89819, |
| | | | | BF821339, R72785, BE769826, R62666, N45434, |
| | | | | BF349116, R72786, AW374237, AW953834, |
| | | | | T16823, AA295668, BE140683, AW277068, |
| | | | | AI872250, AI088641, H78057, H73228, BF881707, |
| | | | | AW374232, AW610099, R24669, H26462, |
| | | | | AI202813, T23681, T72232, H27838, H64952, |
| | | | | BE769808, H70128, N47826, R43349, AI281745, |
| | | | | H83150, AI476021, BF991147, BF338495, |
| | | | | AW605902, AW105588, BF920649, AW085673, |
| | | | | AW082623, BE011964, R17629, AI281707, |
| | | | | AL514409, AI628316, AL513817, AI925156, |
| | | | | AW087534, H27773, AW083175, AW188539, |
| | | | | AI420521, AI621209, AI859429, AI554821, |
| | | | | BF812938, AI697188, AI632033, BE905366, |
| | | | | AI874109, AW075413, AI251434, AA833760, |
| | | | | AI635478, AI684036, BG121959, AI571861, |
| | | | | AI824648, BE965053, AI569945, AI566003, |
| | | | | AI669609, AI680435, AI828818, AA449768, |
| | | | | AI572787, AI653541, AW087160, AI475134, |
| | | | | BE895765, AL514867, AW079654, AI923357, |
| | | | | AI587056, AI654672, AL514579, AI912434, |
| | | | | AL513723, BE964078, AI249962, AL513809, |
| | | | | AI817552, AX040958, AL359615, AF155148, |
| | | | | AK026630, AB034701, AL162083, AF218034, |
| | | | | AB044560, Z82022, AF026008, AL133606, |
| | | | | AK000083, AK026651, AX040974, AL117435, |
| | | | | AL110225, AF177401, AL162062, AF130059, |
| | | | | AF119857, AF130077, AK026480, X96540, |
| | | | | AK026647, A08916, AL137479, AX005848, |
| | | | | AX005804, AL035458, AK026629, AF116644, |
| | | | | AK026947, AL137459, A08910, A08909, |
| | | | | AL122049, A93350, AK026434, AX010492, |
| | | | | I89947, AF017437, I48978, AF090943, A08913, |
| | | | | AK000344, AB049892, AF119875, AL049464, |
| | | | | AF113019, AL137560, AF076633, I33392, |
| | | | | X83508, AF116688, AB052191, AF113694, |
| | | | | AL137271, E02349, AR079032, L31396, L31397, |
| | | | | I89931, AL050149, AK000690, AL049314, |
| | | | | AR087170, AK024538, AF113699, AB048919, |
| | | | | I03321, Y10936, AK025239, AL050108, |
| | | | | AR068753, AB048964, Y11587, AL050024, |
| | | | | AF119860, AF130075, E15569, AK027114, |
| | | | | AK026583, AK025339, AF126247, AF218014, |
| | | | | AL390154, Y13350, AL137523, AL162006, |
| | | | | AK025431, AK026542, AF271350, AF119899, |
| | | | | AL137521, AF061943, Y16645, AL359620, |
| | | | | AL122050, AK025573, AK026624, AL117457, |
| | | | | AK025708, S77771, AL122110, AK025857, |
| | | | | AB038698, AK000618, AL049466, AL137648, |
| | | | | U42766, AK026526, AF242189, AF090903, |
| | | | | A08912, AK000391, AL137527, AL162004, |
| | | | | Y07905, AF314091, AF116639, AB047631, |
| | | | | AL133080, AF130087, AK000310, AL133077, |
| | | | | AL442082, AF056191, AL133072, E02221, |
| | | | | AK026600, AF091084, AK026353, AF138861, |
| | | | | AB047615, AK026045, AF118090, AL117585, |
| | | | | AL137529, AF078844, AK026927, AL050146, |
| | | | | AF090896, AF207829, E07361, AF195092, |
| | | | | AF116682, AF113690, AK025798, X70685, |
| | | | | AF116602, AK025092, AL133557, AF124728, |
| | | | | U00763, AK000323, S83440, AL442072, |
| | | | | AL117394, AF081197, AF090900, AF116631, |
| | | | | AR038854, AK026534, AL133665, A21103, |
| | | | | AK027121, Y11254, AK026959, AL137461, |
| | | | | AL133098, AL389939, AL162002, AK027096, |
| | | | | A08908, AJ000937, AB047887, AL049430, |
| | | | | AF119865, AF111851, AF176651, AB048954, |
| | | | | AL133016, AK027142, AK026857, AK026506, |
| | | | | AL355701, A03736, AL137480, AF106862, |
| | | | | AF116676, AL359623, AB051158, AF130082, |
| | | | | AL162008, U67958, AX019230, AJ242859, |
| | | | | I17767, AL137538, AK027116, AF116691, |
| | | | | AB044547, AL050277, AF125948, I09360, |
| | | | | AF097996, AB048888, AK025906, AL133640, |
| | | | | AK026649, AL117583, AK026741, AK025491, |
| | | | | E07108, AB052200, AF111847, AX027129, |
| | | | | AL133113, AF130110, AL122121, S78214, |
| | | | | AK000486, AL122123, AL133560, AB019565, |
| | | | | AL137429, AF100931, AL137283, AL137557, |
| | | | | AL049283, AK000445, AF087943, AB050510, |
| | | | | AL049382, AF119909, AF110640, AK026855, |
| | | | | AK000212, U72620, AK025435, AK027200, and |
| | | | | AA835433. |
| 77 | HLYFJ90 | 87 | 1243873 | AW629186, W58365, W80353, AA707514, |
| | | | | AI571382, AA677325, AA527041, AI697493, |
| | | | | AA150417, AA844727, AI190775, AI192166, |
| | | | | AI831081, AA148817, AA704578, AA136471, |
| | | | | N98481, AA552027, W24254, AI198260, H22060, |
| | | | | AI307308, W86084, AA781837, N92868, |
| | | | | AA136961, AI052084, AI917791, AI149607, |
| | | | | AI308164, AI933238, AA551635, AI568102, |
| | | | | F22559, BF059641, AI027845, AI263395, R09685, |
| | | | | AI370711, AA902877, R09684, AW362086, |
| | | | | AA648096, AA913295, AI468042, W25594, |
| | | | | AA493101, AL121078, BF913273, AA865211, |
| | | | | AA913724, W78949, BE503336, AW881520, |
| | | | | BG249582, BG164558, BG166654, BF527014, |
| | | | | AV708075, BE047852, BG177717, AW149925, |
| | | | | BF525578, AA580663, BE891834, AL041150, |
| | | | | BG121959, AI623179, BE880190, AW169604, |
| | | | | AL037454, BG058150, AI802240, AI307494, |
| | | | | BF343174, BG034646, BF965877, AL036980, |
| | | | | BG179355, AI345347, BF037975, AI345416, |
| | | | | BE910373, AI345612, BF037097, AI310575, |
| | | | | AI567582, AI345415, AA916133, AI890507, |
| | | | | AI366968, AL079963, BG107576, BE874133, |
| | | | | AI889953, AI340533, AW073994, BF033757, |
| | | | | AI366959, AI686964, BF814761, AV656903, |
| | | | | AL036631, BF968017, AI468872, AL036673, |
| | | | | AW827206, AI500061, AI670009, AI698391, |
| | | | | AI345005, BE138658, AV653297, BG255465, |
| | | | | BE622183, AA225339, BE778198, BF970658, |
| | | | | AW151136, AI287326, AI335338, AL047344, |
| | | | | AW020561, BG251104, AI917994, BF892007, |
| | | | | AI335426, AA421957, AI348777, AW071362, |
| | | | | BF344705, AW301300, AW827193, AW075207, |
| | | | | BF814420, AL048323, AW806761, AI365256, |
| | | | | AI343037, AI366549, AW827228, AI335363, |
| | | | | AL048340, BG028563, AL048656, BG029053, |
| | | | | AI923989, AI254731, AW167918, AI349186, |
| | | | | AI307543, BE965169, AI345557, AL119791, |
| | | | | BG178911, AW071395, AI340659, AI345253, |
| | | | | AI753683, AW269097, AW161579, AI312428, |
| | | | | AI340644, AI311892, BE739277, AI307736, |
| | | | | BF814357, AW020693, BG031664, BG030364, |
| | | | | AI349266, AI310592, AI348897, BE778453, |
| | | | | BG058217, AI862144, AI689420, AV724898, |
| | | | | AI866770, BE876394, BG001235, AI690748, |
| | | | | BE885353, BE969227, AI310920, AW827289, |
| | | | | AW163834, AL118781, BG112718, AI345608, |
| | | | | AW020095, AW302965, AV713580, BF525853, |
| | | | | BF792180, AW059828, AV681759, AL036265, |
| | | | | BE789764, BF816042, AV757035, BG179993, |
| | | | | AW301513, AL037582, AV657079, AL037602, |
| | | | | BF343391, AI307503, BF970362, BF344691, |
| | | | | BG179078, BG029667, BF812960, AI340537, |
| | | | | AI336634, AI307459, AI554245, AW071276, |
| | | | | AW162189, AL121463, AL047422, AL042544, |
| | | | | AL119748, AI473536, AI571439, AV652906, |
| | | | | AL048871, AV721521, BE964078, AV649810, |
| | | | | AV682724, AV729890, AW302992, AI874166, |
| | | | | AL042627, AV682074, AV682326, AL037030, |
| | | | | AI567612, AI824375, AI336575, BG029829, |
| | | | | AI288285, AL040241, AI491775, BF340210, |
| | | | | AI344935, AI620284, BF811793, AL359601, |
| | | | | AK000753, AF056191, AL117460, AX040974, |
| | | | | AK026629, AB049880, AF158248, AF067728, |
| | | | | AX042059, AK024538, I48978, AL122093, |
| | | | | AB048919, AL137557, AK000083, AF119909, |
| | | | | AF113699, AF061943, AL157482, AK024588, |
| | | | | A65341, AK026353, AL133565, I89947, |
| | | | | AK025967, AF130082, X96540, AK027113, |
| | | | | AK000212, U91329, S68736, AF314091, |
| | | | | AK027114, AB047887, A08916, AL050138, |
| | | | | AL390154, AJ299431, AK026959, I48979, |
| | | | | AF130077, A08913, A12297, AF116631, |
| | | | | AK026865, AF113690, AF017437, AF118094, |
| | | | | AF132205, I33392, AL049382, AF262032, |
| | | | | A08912, AJ012755, A08910, I89931, A08909, |
| | | | | AF026124, AB052200, AF177401, AK026542, |
| | | | | AK027111, X82434, AR087170, AL110197, |
| | | | | AF116646, AL050116, AF130110, AF090934, |
| | | | | AF116610, AL137521, AF078844, AL122110, |
| | | | | AL049452, AF000301, AF260566, AF008439, |
| | | | | AF113677, AR038969, AL353940, AF207829, |
| | | | | S61953, AB049892, AF116691, Y16645, |
| | | | | AL133080, A77033, A77035, AL080159, |
| | | | | AF225424, Z82022, AK025798, AF090896, |
| | | | | AF116682, Y11587, I00734, AF271350, |
| | | | | AL080074, AL133104, AF113689, AK025391, |
| | | | | AB048953, AF116654, AF130105, AL137550, |
| | | | | E00617, E00717, E00778, AL442082, AF079765, |
| | | | | AK026592, AK026855, AK026597, AK000137, |
| | | | | I03321, Z72491, AL050172, AL117457, |
| | | | | AK000391, X63574, AL122121, AF057300, |
| | | | | AF057299, AF026816, AF116639, AK026504, |
| | | | | AF130055, AK026480, AK026583, AB047615, |
| | | | | AK026642, AL137560, AL359596, AK026526, |
| | | | | AK025092, AL359615, AL117435, AK024524, |
| | | | | X72889, AX026824, AX026823, AL133560, |
| | | | | A58524, A58523, AL162083, AX040958, |
| | | | | AL122050, AB041801, AK025339, AL137459, |
| | | | | AK026784, AJ238278, AF017152, E07108, |
| | | | | AF090903, AL050149, AL133016, AK000323, |
| | | | | AL133113, AL117432, AL137548, AK026600, |
| | | | | AK026593, AB050510, AX046842, AF208026, |
| | | | | AL137294, AF113013, X98834, U49908, |
| | | | | AB051158, AF119883, AX019230, AF119899, |
| | | | | AL050024, AJ000937, AL049938, AK027164, |
| | | | | AK026927, AR011880, AL050277, AF091084, |
| | | | | AF116688, AF130066, AF116676, E04233, |
| | | | | AK026647, AF111851, AF177336, AK027204, |
| | | | | AF242189, AK025312, AF113676, AR038854, |
| | | | | AF113694, AF119894, AL049300, AL110196, |
| | | | | AF119878, AL133640, AK026045, AK026164, |
| | | | | AF119860, AK000647, AB047904, AF138861, |
| | | | | U35846, A03736, AF113691, AL110280, |
| | | | | AF230496, AL389935, AF111112, AB019565, |
| | | | | AL122049, AL137526, AF097996, AF119875, |
| | | | | Y11254, AK000445, AL049466, AF130100, |
| | | | | AL117583, AK025084, AB048954, AK027213, |
| | | | | AL117585, AK027200, A93350, AL110221, |
| | | | | AL162062, AF130075, AF125948, AB049758, |
| | | | | AL096744, AL133077, AX010492, AL050108, |
| | | | | AL359618, AL050393, AL133072, U42766, |
| | | | | S78214, AK026608, AL122123, AK026462, |
| | | | | AF130059, E07361, and U00763. |
| 77 | HLYFJ90 | 190 | 1218626 | AW629186, W58365, W80353, AA707514, |
| | | | | AA677325, AI571382, AI697493, AA150417, |
| | | | | AA527041, AA844727, AI190775, AI192166, |
| | | | | AA148817, AI831081, N98481, AA136471, |
| | | | | AA704578, AA552027, W24254, AI198260, |
| | | | | H22060, W86084, AA781837, AA136961, N92868, |
| | | | | AI052084, AI917791, AI149607, AI307308, |
| | | | | AI933238, AA551635, AI308164, AI568102, |
| | | | | F22559, AI027845, BF059641, R09685, AI370711, |
| | | | | AI263395, R09684, AA902877, AW362086, |
| | | | | AA648096, AA913295, AI468042, W25594, |
| | | | | AA493101, BF913273, AL121078, AA865211, |
| | | | | W78949, AA913724, BE503336, AW881520, |
| | | | | R78164, and AI906039. |
| 78 | HMLHD54 | 88 | 1243834 | AL525815, AL513933, BE613037, AL513934, |
| | | | | AL525855, BE907046, AA680328, AL531478, |
| | | | | AL531477, AI086068, BE881149, BF034542, |
| | | | | AI808996, BE876417, AI472146, BG179117, |
| | | | | BE873774, AW189572, AW439178, AI623450, |
| | | | | AL528905, AI612758, BE710393, AI472067, |
| | | | | AW117897, AI554566, AW189151, AA085582, |
| | | | | BE785258, AA554828, BF431916, BF430973, |
| | | | | W52490, AA526837, BE734344, BF590357, |
| | | | | BE260921, BE927705, AW339734, BE620493, |
| | | | | AA161483, BE962575, AW304916, BG254861, |
| | | | | BG028029, AI536777, AA913459, BE612357, |
| | | | | AA533037, AA234924, BE881738, BE898403, |
| | | | | BE733539, AW468992, BE897519, AW886502, |
| | | | | BE622014, AA643610, AA151194, BE834385, |
| | | | | BE967212, AA706596, AW959302, BF744358, |
| | | | | AI634597, BE710446, BF745246, AA234925, |
| | | | | AI208156, BF744357, BE278764, BF744648, |
| | | | | AW838915, AI459828, BE272744, AI358324, |
| | | | | BE710474, AW938825, AW189865, AI929467, |
| | | | | AI452700, AA233379, N41687, AV688903, |
| | | | | AI358564, AI684134, AI868628, BF939149, |
| | | | | BF895375, BE737207, AA724153, AI928985, |
| | | | | AA666281, AI300741, AA865704, AI435019, |
| | | | | AW881424, AI433265, AA102021, BG107509, |
| | | | | AA085714, AW603389, AI816245, AI816324, |
| | | | | BG252911, AI249273, AA948064, AA233012, |
| | | | | T95929, BF802517, N28668, AA504539, |
| | | | | BE880085, BF809912, AA301441, BF803201, |
| | | | | BF745257, AW886516, BF747102, BF803200, |
| | | | | T95834, AA913442, BF850106, AA533751, |
| | | | | BF919530, C21380, AI565199, BF850102, |
| | | | | BF959271, BF958073, AA844821, AA905209, |
| | | | | BF958074, BF850090, BF850098, BF959267, |
| | | | | BF109084, AI919584, BE934981, AI539681, |
| | | | | BE837584, BF837464, AA348086, AW886722, |
| | | | | AI620671, AA160955, AI381669, BF837462, |
| | | | | BF747103, AA583023, and AL031320. |
| 78 | HMLHD54 | 191 | 1214441 | AL525855, AL513934, AL531478, AL528905, |
| | | | | BE734344, BE620493, BG254861, BE612357, |
| | | | | BE881738, BE733539, BE622014, BE897519, |
| | | | | BE898403, BE737207, BE278764, BE260921, |
| | | | | BE272744, AI929467, AW938825, BF745246, |
| | | | | BF744358, BE907046, BG028029, BG179117, |
| | | | | BF744357, AI928985, BF744648, AA102021, |
| | | | | AA085714, AI816324, AW603389, BG252911, |
| | | | | N28668, AA504539, BF745257, BF747102, |
| | | | | AA348086, AL525815, AA160955, BE881149, |
| | | | | AW838915, BE873774, BE710393, BF034542, |
| | | | | and AL031320. |
| 79 | HBPOM70 | 89 | 1283382 | AW368451, BF943652, AA099385, AA099386, |
| | | | | AA029791, AA029790, BE145192, W38789, |
| | | | | AA378020, AA411303, and R81402. |
| 79 | HBPOM70 | 192 | 1210399 | AW368451, BE222668, BF057062, BF059422, |
| | | | | BF943652, AA417890, AA099385, AW236145, |
| | | | | AW471449, AI276742, AI766890, AA099386, |
| | | | | N78573, W07168, AA001874, W79183, |
| | | | | AA436249, AW292407, AA055463, AA482460, |
| | | | | AI252807, AI266170, W74429, BF476100, |
| | | | | AI167320, N93113, AA029791, AA055462, |
| | | | | AI536067, AW003037, AA411303, AA404452, |
| | | | | H25100, AW296497, AW236004, AA001796, |
| | | | | AA029790, BE145192, W38789, AA831374, |
| | | | | BE833432, H24895, R81403, R81402, AA993005, |
| | | | | AA378020, AW235742, AI078078, and N58979. |
| 80 | HMSMO35 | 90 | 1243922 | AV714931, AA708108, BE541237, AL138293, |
| | | | | AU140403, AV760760, AV700663, BE796439, |
| | | | | AV699393, BE538259, BF872337, AA577824, |
| | | | | BG260565, AV722030, AV762220, AV734401, |
| | | | | BF826830, BF915799, AV760723, AU154050, |
| | | | | AV762129, BE300645, BF828714, AV722075, |
| | | | | BF892846, BE566072, AL048626, AU147226, |
| | | | | AL135377, AA486896, AA708751, AU144517, |
| | | | | AA524604, BE867712, AL524262, AV699423, |
| | | | | AA481760, AV762783, BF574637, AU123691, |
| | | | | AV700654, AL079869, AW963473, AW963982, |
| | | | | AW504485, AW407632, BE394939, AU117926, |
| | | | | AA608588, AA640277, AW085751, BF528078, |
| | | | | BF902291, BF736198, AA608612, AI866487, |
| | | | | BE075868, AW405593, AA613257, AI114591, |
| | | | | AA315361, AL080314, AC005231, AC009362, |
| | | | | AC005081, AF111169, AC002477, AC005736, |
| | | | | AL031311, AC004089, AC005520, AL109825, |
| | | | | AL050349, AC005015, Z93023, AP001630, |
| | | | | AP001711, AC004166, AC006509, AC016395, |
| | | | | AC007868, AC008155, AL031848, AC003036, |
| | | | | Z99716, AC009086, AC011465, AC020934, |
| | | | | AL121900, AJ277546, AC020913, AC005619, |
| | | | | AL109613, AC005037, AL022320, AP001748, |
| | | | | AL049830, AC004491, AL024507, AC007345, |
| | | | | AC008738, AC011469, U62293, AL138721, |
| | | | | AC011479, AL049832, AC002425, AL049829, |
| | | | | AL121653, AP000500, AL049569, AP001725, |
| | | | | AC018720, AP001752, AC005098, AC004922, |
| | | | | AL121771, AC004966, AC006337, AL031390, |
| | | | | AC006329, AL035587, AC008066, AC004884, |
| | | | | AC008760, AC016027, AL049776, AP001717, |
| | | | | AC005839, AL035404, AP001727, AC018663, |
| | | | | AC022392, AF196970, AC007182, AC005529, |
| | | | | AC005102, AC007226, AC027319, AP000694, |
| | | | | AC004893, AL022237, AC020552, AC006449, |
| | | | | AL050335, AL136172, Z82172, AC016830, |
| | | | | AL121897, AL121658, AC011491, AC068799, |
| | | | | AC009298, AC007999, AL024498, AL353574, |
| | | | | Z97054, AL049537, AC004542, AC007383, |
| | | | | AC005527, AF001549, AL033529, AC004876, |
| | | | | D87675, AC021016, Z94801, AC020916, |
| | | | | AL121585, AP001710, AC004834, AC020550, |
| | | | | AC007842, AC005669, AC008569, AL031281, |
| | | | | AC008403, AF235097, AL079335, AP000555, |
| | | | | AC002400, Z93930, AC004217, AC007263, |
| | | | | Z84469, AL034417, AL031735, AC005726, |
| | | | | AC002350, AL137129, AP001208, AC023425, |
| | | | | AC000025, AC007938, AC006345, AC008521, |
| | | | | AL117380, AC002418, AC006111, AC010458, |
| | | | | AC011489, AL109797, AL050318, AP001330, |
| | | | | AC020904, AC006483, AC009470, AC004965, |
| | | | | AF111168, AL109963, AL354872, AC009955, |
| | | | | AC007308, AL132777, AC005632, AC006011, |
| | | | | AL499628, AF124523, AL133448, AC007327, |
| | | | | AL049795, AL022163, AL031737, AP000030, |
| | | | | AC004084, AC005089, AC011480, AL353804, |
| | | | | AL133215, U91323, AL035086, AC004656, |
| | | | | AC007225, AC008745, AC005522, AC007956, |
| | | | | AL137818, AF196969, AC004819, AE000658, |
| | | | | AL161445, AC009311, AL022328, AL139353, |
| | | | | AC007954, AL080243, AL035461, U91321, |
| | | | | AC008736, AC005837, AL035683, AL139339, |
| | | | | AL161781, AC008616, AC004125, AC006014, |
| | | | | AC004867, AC006312, AL117336, AL022476, |
| | | | | AC007151, AC005295, AC005887, AL022323, |
| | | | | AC012384, AC025588, AC008750, AC007957, |
| | | | | AC004659, AC003101, AC007850, AC005531, |
| | | | | AC018644, AL034420, AB023050, AC025593, |
| | | | | AL009181, AC007172, Z95115, AL136137, |
| | | | | AC005944, AL078581, AC006121, AC008784, |
| | | | | AC011495, AP001753, AC009244, AC004990, |
| | | | | AP000212, AP000134, AL133288, AL031005, |
| | | | | AC010618, AL021391, AC011452, AL132765, |
| | | | | AP000553, Z84466, AC006965, AL023553, |
| | | | | AC009002, AC005952, AC007363, AC011490, |
| | | | | AP000353, AC011464, AL034429, AC005695, |
| | | | | AL135839, AC005488, and AP001759. |
| 81 | HMUCI88 | 91 | 1256397 | AI670100, AL040592, AW192857, AI924560, |
| | | | | AI745172, AI554795, R43941, AI815747, |
| | | | | AI016875, BF445691, BF445690, T15732, T17119, |
| | | | | AI301252, BF038572, AA665984, AI819865, |
| | | | | W69293, W69294, AI830849, BF058775, W15272, |
| | | | | AW166780, H41501, AA829386, H51177, |
| | | | | AW072981, H11424, BE220204, W25654, |
| | | | | AI352230, AA456766, R40213, BF447396, |
| | | | | R48114, R47999, W02701, AI628723, W60501, |
| | | | | H93511, BE246910, T33269, BF001903, |
| | | | | AW614134, AA458940, R39118, AI016657, and |
| | | | | BF829877. |
| 81 | HMUCI88 | 194 | 1209766 | BE408692, BE867639, BE294258, BE294711, |
| | | | | AI670100, AW954563, BF732613, BF111894, |
| | | | | BE675998, AI453554, AL040592, AI183347, |
| | | | | AA769112, AW007124, AI275597, AL040591, |
| | | | | AI924560, AI830912, AW026311, W03018, |
| | | | | AI141179, BG169470, BF059042, AA847666, |
| | | | | AI690200, BF440020, N21662, BG150026, |
| | | | | AI340038, AI745172, AW192857, AI052646, |
| | | | | AI017823, AI554795, BF446007, BF688795, |
| | | | | AI860464, AI570410, AA393934, AI374791, |
| | | | | AI366708, BF449025, AI815747, W72235, |
| | | | | AI016875, AI343003, AW965580, W76472, |
| | | | | N72276, AW001484, N68988, BF445994, |
| | | | | BF445691, AI022212, R48114, W60501, |
| | | | | BF445690, AI684578, W69293, AA456766, |
| | | | | R84578, AW297598, N27124, T17119, BE818146, |
| | | | | AI830849, T15732, BF477844, H24887, AI819865, |
| | | | | BF829877, AA665984, AI301252, AA216704, |
| | | | | AA954544, H11531, R43941, AI815941, H93511, |
| | | | | AA746046, H51177, W69294, BF058775, |
| | | | | AW166780, N40060, T33270, W15272, Z44718, |
| | | | | BF038572, R13995, BE836928, H84314, |
| | | | | AA829386, T08615, AW072981, H41501, H39684, |
| | | | | AA988034, N76401, H11424, BF477587, |
| | | | | AW968809, BE220204, W25654, R18830, |
| | | | | AI352230, R40213, R69605, H21592, H97176, |
| | | | | BF447396, BG000118, AA489679, BE871213, |
| | | | | H42932, AW247730, BF745393, R47999, W02701, |
| | | | | BE836925, BF811125, AI628723, W39233, |
| | | | | AA748168, BE041494, AI336273, AW451867, |
| | | | | T33269, BE246910, BF001903, AW732072, |
| | | | | H25086, AI758366, AW614134, AA824466, |
| | | | | BE000406, AW452112, BE206969, AA877559, |
| | | | | AA458940, H21513, R39118, BE466544, |
| | | | | BF514031, BE836910, AI016657, BE836903, |
| | | | | AW469146, and M94721. |
| 82 | HMUDN51 | 92 | 1275158 | BE732224, AW025604, AW963839, AI344048, |
| | | | | BE042489, AW025605, AI732328, H78941, |
| | | | | AI768505, AW884213, AA371876, AA862436, |
| | | | | AA587744, T97673, AW750816, AU159322, |
| | | | | AI033275, BE175100, BG248789, AW087466, |
| | | | | AA375852, BE041287, BE159584, AA860560, |
| | | | | BF809952, AK023937, and AB014607. |
| 82 | HMUDN51 | 195 | 1209998 | BE732224, AK023937, and AB014607. |
| 83 | HMAGC36 | 93 | 1262016 | AI990481, AI090193, AW245081, AI143992, |
| | | | | AI598190, AI859137, AI350501, AA495832, |
| | | | | AI361951, AI990174, AI380542, AW003834, |
| | | | | AA994262, AW025153, AI394639, AI086091, |
| | | | | AA976745, AA293019, AA417706, BE727402, |
| | | | | AI351614, AI202144, AA495776, W00431, |
| | | | | AA253139, AA115762, R88936, N72164, |
| | | | | AW237082, R90773, AI766469, AI672360, |
| | | | | BF718243, AA745682, AW134904, F23330, |
| | | | | AL119175, AW268196, AI913519, AW274357, |
| | | | | R36266, AA133537, AA113803, AA496881, |
| | | | | AA610858, AA417588, AI685216, AW072885, |
| | | | | AW966703, AA326898, AA114066, AA344498, |
| | | | | AA248795, AW474388, BE252368, AA905473, |
| | | | | BF222472, BG060006, BF755528, BG112348, |
| | | | | BF895218, AF218008, AC005787, and AC005786. |
| 83 | HMAGC36 | 196 | 1219629 | AI990481, AI138384, AI090193, AI859137, |
| | | | | AI598190, AW245081, AI350501, AI143992, |
| | | | | AW003834, AI032285, AW025153, AI990174, |
| | | | | AA495832, AI361951, AA994262, AI086091, |
| | | | | AI041269, AA417706, AI380542, AI394639, |
| | | | | AA495776, AA976745, AA293019, BG029787, |
| | | | | BE872513, AA253139, AI183841, W00431, |
| | | | | AI351614, BE727402, AW237082, R88936, |
| | | | | AA115762, AI202144, N72164, R90773, |
| | | | | AI766469, AL119175, BF718243, AA745682, |
| | | | | AA725758, AI672360, AA113803, AW134904, |
| | | | | F23330, BF829762, AA133537, AI913519, |
| | | | | R36266, BE410356, AA496881, AW274357, |
| | | | | AW268196, AA610858, AW072885, AI685216, |
| | | | | AW966703, AA417588, AA326898, AA344498, |
| | | | | AA248795, AA114066, BF744645, AW474388, |
| | | | | BE277069, BE252368, BE408266, AA906034, |
| | | | | BF755528, AC005786, AC005787, AF218008, and |
| | | | | R36265. |
| 83 | HMAGC36 | 197 | 1219632 | BF689868, BF027339, BE791172, BE273437, |
| | | | | BE260092, BG031379, BF339469, BF984194, |
| | | | | AI760572, AI760520, BE676312, BE294301, |
| | | | | AW297966, AW245081, AA495832, AI090193, |
| | | | | AI361951, AA962223, AI244284, AI143992, |
| | | | | AI598190, AI990174, AI380542, AI422554, |
| | | | | AI859137, AI350501, AA994262, AI990481, |
| | | | | AI971830, AI394639, AI086091, BF975689, |
| | | | | BE383741, AW003834, AA976745, BE252368, |
| | | | | AA293019, AA644162, AI351614, AA253139, |
| | | | | N50101, AW136878, AA115762, AI813447, |
| | | | | AI732960, BF059508, AW070837, AW246650, |
| | | | | R88936, AI202144, AW237082, N72164, |
| | | | | AA862886, AW190926, AW025153, R90773, |
| | | | | BE727402, BF027207, AI766469, AW129676, |
| | | | | AI672360, BF718243, AA745682, AW134904, |
| | | | | AL119175, BF690095, N33565, AA495776, |
| | | | | F23330, AA417706, BF869114, AI913519, |
| | | | | AI284384, AW268196, AW274357, R36266, |
| | | | | W00431, BE408877, AA496881, BE159093, |
| | | | | BE410963, AA610858, AA417588, AI582214, |
| | | | | BG060127, AI685216, BG033163, AW072885, |
| | | | | W70088, BE546341, BF222472, AA905473, |
| | | | | BG060006, BF691868, AA082841, AA114066, |
| | | | | AW474388, BF745906, AA133537, AI000915, |
| | | | | AA293473, AI693690, AW971745, AA326898, |
| | | | | AA248795, AW861944, AW804686, BF755528, |
| | | | | AW392670, AW966703, BE695785, AL119401, |
| | | | | BF763934, AW604723, AA344498, BE705903, |
| | | | | AW858526, BE705906, AW372827, AW858525, |
| | | | | AW577135, AL134902, AW384394, U46351, |
| | | | | AW861889, AW858455, AL119443, AW363220, |
| | | | | AL119497, AL119319, AL119457, AL119341, |
| | | | | AL119355, AL119324, BF868697, AL119396, |
| | | | | U46341, AL119522, Z99396, AW877209, |
| | | | | AL119483, AL042433, AL119484, AL119363, |
| | | | | AL119391, U46350, U46347, U46349, BE705905, |
| | | | | AL119335, AL119444, U46346, BF868684, |
| | | | | AL134536, AL037205, AL042614, AW604726, |
| | | | | BF868687, AL119439, AI142132, BE705904, |
| | | | | AL119399, AL119496, AL134525, AW861954, |
| | | | | AL134524, U46345, AL119418, AL043019, |
| | | | | AL134527, AL042450, AL134538, AL042544, |
| | | | | AL042978, AL042896, AI142137, AL042965, |
| | | | | AL042975, AL042970, AL042542, AL042984, |
| | | | | AI142139, AL043029, AL042551, AL043003, |
| | | | | AB033068, AC005786, AC005787, AF218008, |
| | | | | AR080280, AB026436, AR054110, AJ251859, |
| | | | | AX030435, AR066494, A81671, AR060234, |
| | | | | AR069079, AX046357, and AJ279014. |

[0302] TABLE 4

| Code | Description | Tissue | Organ | Cell Line | Disease | Vector |
|---|---|---|---|---|---|---|
| AR022 | a_Heart | a_Heart | | | | |
| AR023 | a_Liver | a_Liver | | | | |
| AR024 | a_mammary gland | a_mammary gland | | | | |
| AR025 | a_Prostate | a_Prostate | | | | |
| AR026 | a_small intestine | a_small intestine | | | | |
| AR027 | a_Stomach | a_Stomach | | | | |
| AR028 | Blood B cells | Blood B cells | | | | |
| AR029 | Blood B cells activated | Blood B cells | | | | |
| | | activated | | | | |
| AR030 | Blood B cells resting | Blood B cells | | | | |
| | | resting | | | | |
| AR031 | Blood T cells activated | Blood T cells | | | | |
| | | activated | | | | |
| AR032 | Blood T cells resting | Blood T cells resting | | | | |
| AR033 | brain | brain | | | | |
| AR034 | breast | breast | | | | |
| AR035 | breast cancer | breast cancer | | | | |
| AR036 | Cell Line CAOV3 | Cell Line CAOV3 | | | | |
| AR037 | cell line PA-1 | cell line PA-1 | | | | |
| AR038 | cell line transformed | cell line transformed | | | | |
| AR039 | colon | colon | | | | |
| AR040 | colon (9808co65R) | colon (9808co65R) | | | | |
| AR041 | colon (9809co15) | colon (9809co15) | | | | |
| AR042 | colon cancer | colon cancer | | | | |
| AR043 | colon cancer (9808co64R) | colon cancer | | | | |
| | | (9808co64R) | | | | |
| AR044 | colon cancer 9809co14 | colon cancer | | | | |
| | | 9809co14 | | | | |
| AR045 | corn clone 5 | corn clone 5 | | | | |
| AR046 | corn clone 6 | corn clone 6 | | | | |
| AR047 | corn clone2 | corn clone2 | | | | |
| AR048 | corn clone3 | corn clone3 | | | | |
| AR049 | Corn Clone4 | Corn Clone4 | | | | |
| AR050 | Donor II B Cells 24 hrs | Donor II B Cells | | | | |
| | | 24 hrs | | | | |
| AR051 | Donor II B Cells 72 hrs | Donor II B Cells | | | | |
| | | 72 hrs | | | | |
| AR052 | Donor II B-Cells 24 hrs. | Donor II B-Cells 24 hrs. | | | | |
| AR053 | Donor II B-Cells 72 hrs | Donor II B-Cells | | | | |
| | | 72 hrs | | | | |
| AR054 | Donor II Resting B Cells | Donor II Resting B | | | | |
| | | Cells | | | | |
| AR055 | Heart | Heart | | | | |
| AR056 | Human Lung (clonetech) | Human Lung | | | | |
| | | (clonetech) | | | | |
| AR057 | Human Mammary | Human Mammary | | | | |
| | (clontech) | (clontech) | | | | |
| AR058 | Human Thymus | Human Thymus | | | | |
| | (clonetech) | (clonetech) | | | | |
| AR059 | Jurkat (unstimulated) | Jurkat | | | | |
| | | (unstimulated) | | | | |
| AR060 | Kidney | Kidney | | | | |
| AR061 | Liver | Liver | | | | |
| AR062 | Liver (Clontech) | Liver (Clontech) | | | | |
| AR063 | Lymphocytes chronic | Lymphocytes | | | | |
| | lymphocytic leukaemia | chronic lymphocytic | | | | |
| | | leukaemia | | | | |
| AR064 | Lymphocytes diffuse large | Lymphocytes | | | | |
| | B cell lymphoma | diffuse large B cell | | | | |
| | | lymphoma | | | | |
| AR065 | Lymphocytes follicular | Lymphocytes | | | | |
| | lymphoma | follicular lymphoma | | | | |
| AR066 | normal breast | normal breast | | | | |
| AR067 | Normal Ovarian | Normal Ovarian | | | | |
| | (4004901) | (4004901) | | | | |
| AR068 | Normal Ovary 9508G045 | Normal Ovary | | | | |
| | | 9508G045 | | | | |
| AR069 | Normal Ovary 9701G208 | Normal Ovary | | | | |
| | | 9701G208 | | | | |
| AR070 | Normal Ovary 9806G005 | Normal Ovary | | | | |
| | | 9806G005 | | | | |
| AR071 | Ovarian Cancer | Ovarian Cancer | | | | |
| AR072 | Ovarian Cancer | Ovarian Cancer | | | | |
| | (9702G001) | (9702G001) | | | | |
| AR073 | Ovarian Cancer | Ovarian Cancer | | | | |
| | (9707G029) | (9707G029) | | | | |
| AR074 | Ovarian Cancer | Ovarian Cancer | | | | |
| | (9804G011) | (9804G011) | | | | |
| AR075 | Ovarian Cancer | Ovarian Cancer | | | | |
| | (9806G019) | (9806G019) | | | | |
| AR076 | Ovarian Cancer | Ovarian Cancer | | | | |
| | (9807G017) | (9807G017) | | | | |
| AR077 | Ovarian Cancer | Ovarian Cancer | | | | |
| | (9809G001) | (9809G001) | | | | |
| AR078 | ovarian cancer 15799 | ovarian cancer | | | | |
| | | 15799 | | | | |
| AR079 | Ovarian Cancer | Ovarian Cancer | | | | |
| | 17717AID | 17717AID | | | | |
| AR080 | Ovarian Cancer | Ovarian Cancer | | | | |
| | 4004664B1 | 4004664B1 | | | | |
| AR081 | Ovarian Cancer | Ovarian Cancer | | | | |
| | 4005315A1 | 4005315A1 | | | | |
| AR082 | ovarian cancer 94127303 | ovarian cancer | | | | |
| | | 94127303 | | | | |
| AR083 | Ovarian Cancer 96069304 | Ovarian Cancer | | | | |
| | | 96069304 | | | | |
| AR084 | Ovarian Cancer 9707G029 | Ovarian Cancer | | | | |
| | | 9707G029 | | | | |
| AR085 | Ovarian Cancer 9807G045 | Ovarian Cancer | | | | |
| | | 9807G045 | | | | |
| AR086 | ovarian cancer 9809G001 | ovarian cancer | | | | |
| | | 9809G001 | | | | |
| AR087 | Ovarian Cancer | Ovarian Cancer | | | | |
| | 9905C032RC | 9905C032RC | | | | |
| AR088 | Ovarian cancer 9907 C00 | Ovarian cancer 9907 | | | | |
| | 3rd | C00 3rd | | | | |
| AR089 | Prostate | Prostate | | | | |
| AR090 | Prostate (clonetech) | Prostate (clonetech) | | | | |
| AR091 | prostate cancer | prostate cancer | | | | |
| AR092 | prostate cancer #15176 | prostate cancer | | | | |
| | | #15176 | | | | |
| AR093 | prostate cancer #15509 | prostate cancer | | | | |
| | | #15509 | | | | |
| AR094 | prostate cancer #15673 | prostate cancer | | | | |
| | | #15673 | | | | |
| AR095 | Small Intestine (Clontech) | Small Intestine | | | | |
| | | (Clontech) | | | | |
| AR096 | Spleen | Spleen | | | | |
| AR097 | Thymus T cells activated | Thymus T cells | | | | |
| | | activated | | | | |
| AR098 | Thymus T cells resting | Thymus T cells | | | | |
| | | resting | | | | |
| AR099 | Tonsil | Tonsil | | | | |
| AR100 | Tonsil geminal center | Tonsil geminal | | | | |
| | centroblast | center centroblast | | | | |
| AR101 | Tonsil germinal center B | Tonsil germinal | | | | |
| | cell | center B cell | | | | |
| AR102 | Tonsil lymph node | Tonsil lymph node | | | | |
| AR103 | Tonsil memory B cell | Tonsil memory B | | | | |
| | | cell | | | | |
| AR104 | Whole Brain | Whole Brain | | | | |
| AR105 | Xenograft ES-2 | Xenograft ES-2 | | | | |
| AR106 | Xenograft SW626 | Xenograft SW626 | | | | |
| H0002 | Human Adult Heart | Human Adult Heart | Heart | | | Uni-ZAP XR |
| H0008 | Whole 6 Week Old | | | | | Uni-ZAP XR |
| | Embryo | | | | | |
| H0009 | Human Fetal Brain | | | | | Uni-ZAP XR |
| H0011 | Human Fetal Kidney | Human Fetal Kidney | Kidney | | | Uni-ZAP XR |
| H0012 | Human Fetal Kidney | Human Fetal Kidney | Kidney | | | Uni-ZAP XR |
| H0013 | Human 8 Week Whole | Human 8 Week Old | Embryo | | | Uni-ZAP XR |
| | Embryo | Embryo | | | | |
| H0014 | Human Gall Bladder | Human Gall Bladder | Gall | | | Uni-ZAP XR |
| | | | Bladder | | | |
| H0015 | Human Gall Bladder, | Human Gall Bladder | Gall | | | Uni-ZAP XR |
| | fraction II | | Bladder | | | |
| H0022 | Jurkat Cells | Jurkat T-Cell Line | | | | Lambda ZAP |
| | | | | | | II |
| H0024 | Human Fetal Lung III | Human Fetal Lung | Lung | | | Uni-ZAP XR |
| H0026 | Namalwa Cells | Namalwa B-Cell | | | | Lambda ZAP |
| | | Line, EBV | | | | II |
| | | immortalized | | | | |
| H0031 | Human Placenta | Human Placenta | Placenta | | | Uni-ZAP XR |
| H0032 | Human Prostate | Human Prostate | Prostate | | | Uni-ZAP XR |
| H0036 | Human Adult Small | Human Adult Small | Small | | | Uni-ZAP XR |
| | Intestine | Intestine | Int. | | | |
| H0038 | Human Testes | Human Testes | Testis | | | Uni-ZAP XR |
| H0039 | Human Pancreas Tumor | Human Pancreas | Pancreas | | disease | Uni-ZAP XR |
| | | Tumor | | | | |
| H0040 | Human Testes Tumor | Human Testes | Testis | | disease | Uni-ZAP XR |
| | | Tumor | | | | |
| H0041 | Human Fetal Bone | Human Fetal Bone | Bone | | | Uni-ZAP XR |
| H0042 | Human Adult Pulmonary | Human Adult | Lung | | | Uni-ZAP XR |
| | | Pulmonary | | | | |
| H0046 | Human Endometrial | Human Endometrial | Uterus | | disease | Uni-ZAP XR |
| | Tumor | Tumor | | | | |
| H0050 | Human Fetal Heart | Human Fetal Heart | Heart | | | Uni-ZAP XR |
| H0051 | Human Hippocampus | Human | Brain | | | Uni-ZAP XR |
| | | Hippocampus | | | | |
| H0052 | Human Cerebellum | Human Cerebellum | Brain | | | Uni-ZAP XR |
| H0056 | Human Umbilical Vein, | Human Umbilical | Umbilical | | | Uni-ZAP XR |
| | Endo. remake | Vein Endothelial | vein | | | |
| | | Cells | | | | |
| H0057 | Human Fetal Spleen | | | | | Uni-ZAP XR |
| H0059 | Human Uterine Cancer | Human Uterine | Uterus | | disease | Lambda ZAP |
| | | Cancer | | | | II |
| H0063 | Human Thymus | Human Thymus | Thymus | | | Uni-ZAP XR |
| H0068 | Human Skin Tumor | Human Skin Tumor | Skin | | disease | Uni-ZAP XR |
| H0069 | Human Activated T-Cells | Activated T-Cells | Blood | Cell Line | | Uni-ZAP XR |
| H0078 | Human Lung Cancer | Human Lung Cancer | Lung | | disease | Lambda ZAP |
| | | | | | | II |
| H0083 | HUMAN JURKAT | Jurkat Cells | | | | Uni-ZAP XR |
| | MEMBRANE BOUND | | | | | |
| | POLYSOMES | | | | | |
| H0086 | Human epithelioid | Epithelioid | Sk | | disease | Uni-ZAP XR |
| | sarcoma | Sarcoma, muscle | Muscle | | | |
| H0087 | Human Thymus | Human Thymus | | | | pBluescript |
| H0090 | Human T-Cell Lymphoma | T-Cell Lymphoma | T-Cell | | disease | Uni-ZAP XR |
| H0100 | Human Whole Six Week | Human Whole Six | Embryo | | | Uni-ZAP XR |
| | Old Embryo | Week Old Embryo | | | | |
| H0102 | Human Whole 6 Week | Human Whole Six | Embryo | | | pBluescript |
| | Old Embryo (II), subt | Week Old Embryo | | | | |
| H0111 | Human Placenta, | Human Placenta | Placenta | | | pBluescript |
| | subtracted | | | | | |
| H0122 | Human Adult Skeletal | Human Skeletal | Sk | | | Uni-ZAP XR |
| | Muscle | Muscle | Muscle | | | |
| H0123 | Human Fetal Dura Mater | Human Fetal Dura | Brain | | | Uni-ZAP XR |
| | | Mater | | | | |
| H0124 | Human | Human | Sk | | disease | Uni-ZAP XR |
| | Rhabdomyosarcoma | Rhabdomyosarcoma | Muscle | | | |
| H0125 | Cem cells cyclohexamide | Cyclohexamide | Blood | Cell Line | | Uni-ZAP XR |
| | treated | Treated Cem, Jurkat, | | | | |
| | | Raji, and Supt | | | | |
| H0129 | Jurkat cells, thiouridine | Jurkat Cells | | | | Uni-ZAP XR |
| | activated, fract II | | | | | |
| H0131 | LNCAP + o.3 nM R1881 | LNCAP Cell Line | Prostate | Cell Line | | Uni-ZAP XR |
| H0134 | Raji Cells, cyclohexamide | Cyclohexamide | Blood | Cell Line | | Uni-ZAP XR |
| | treated | Treated Cem, Jurkat, | | | | |
| | | Raji, and Supt | | | | |
| H0135 | Human Synovial Sarcoma | Human Synovial | Synovium | | | Uni-ZAP XR |
| | | Sarcoma | | | | |
| H0136 | Supt Cells, cyclohexamide | Cyclohexamide | Blood | Cell Line | | Uni-ZAP XR |
| | treated | Treated Cem, Jurkat, | | | | |
| | | Raji, and Supt | | | | |
| H0144 | Nine Week Old Early | 9 Wk Old Early | Embryo | | | Uni-ZAP XR |
| | Stage Human | Stage Human | | | | |
| H0149 | 7 Week Old Early Stage | Human Whole 7 | Embryo | | | Uni-ZAP XR |
| | Human, subtracted | Week Old Embryo | | | | |
| H0156 | Human Adrenal Gland | Human Adrenal | Adrenal | | disease | Uni-ZAP XR |
| | Tumor | Gland Tumor | Gland | | | |
| H0159 | Activated T-Cells, 8 hrs., | Activated T-Cells | Blood | Cell Line | | Uni-ZAP XR |
| | ligation 2 | | | | | |
| H0163 | Human Synovium | Human Synovium | Synovium | | | Uni-ZAP XR |
| H0164 | Human Trachea Tumor | Human Trachea | Trachea | | disease | Uni-ZAP XR |
| | | Tumor | | | | |
| H0169 | Human Prostate Cancer, | Human Prostate | Prostate | | disease | Uni-ZAP XR |
| | Stage C fraction | Cancer, stage C | | | | |
| H0170 | 12 Week Old Early Stage | Twelve Week Old | Embryo | | | Uni-ZAP XR |
| | Human | Early Stage Human | | | | |
| H0171 | 12 Week Old Early Stage | Twelve Week Old | Embryo | | | Uni-ZAP XR |
| | Human, II | Early Stage Human | | | | |
| H0176 | CAMA1Ee Cell Line | CAMA1Ee Cell | Breast | Cell Line | | Uni-ZAP XR |
| | | Line | | | | |
| H0177 | CAMA1Ee Cell Line | CAMA1Ee Cell | Breast | Cell Line | | Uni-ZAP XR |
| | | Line | | | | |
| H0178 | Human Fetal Brain | Human Fetal Brain | Brain | | | Uni-ZAP XR |
| H0179 | Human Neutrophil | Human Neutrophil | Blood | Cell Line | | Uni-ZAP XR |
| H0180 | Human Primary Breast | Human Primary | Breast | | disease | Uni-ZAP XR |
| | Cancer | Breast Cancer | | | | |
| H0181 | Human Primary Breast | Human Primary | Breast | | disease | Uni-ZAP XR |
| | Cancer | Breast Cancer | | | | |
| H0184 | Human Colon Cancer, | Human Colon | Liver | | disease | Lambda ZAP |
| | metasticized to live | Cancer, metasticized | | | | II |
| | | to liver | | | | |
| H0194 | Human Cerebellum, | Human Cerebellum | Brain | | | pBluescript |
| | subtracted | | | | | |
| H0196 | Human Cardiomyopathy, | Human | Heart | | | Uni-ZAP XR |
| | subtracted | Cardiomyopathy | | | | |
| H0197 | Human Fetal Liver, | Human Fetal Liver | Liver | | | Uni-ZAP XR |
| | subtracted | | | | | |
| H0204 | Human Colon Cancer, | Human Colon | Colon | | | pBluescript |
| | subtracted | Cancer | | | | |
| H0208 | Early Stage Human Lung, | Human Fetal Lung | Lung | | | pBluescript |
| | subtracted | | | | | |
| H0213 | Human Pituitary, | Human Pituitary | | | | Uni-ZAP XR |
| | subtracted | | | | | |
| H0222 | Activated T-Cells, 8 hrs, | Activated T-Cells | Blood | Cell Line | | Uni-ZAP XR |
| | subtracted | | | | | |
| H0231 | Human Colon, subtraction | Human Colon | | | | pBluescript |
| H0232 | Human Colon, differential | Human Colon | | | | pBluescript |
| | expression | | | | | |
| H0235 | Human colon cancer, | Human Colon | Liver | | | pBluescript |
| | metaticized to liver, | Cancer, metasticized | | | | |
| | subtraction | to liver | | | | |
| H0244 | Human 8 Week Whole | Human 8 Week Old | Embryo | | | Uni-ZAP XR |
| | Embryo, subtracted | Embryo | | | | |
| H0250 | Human Activated | Human Monocytes | | | | Uni-ZAP XR |
| | Monocytes | | | | | |
| H0251 | Human Chondrosarcoma | Human | Cartilage | | disease | Uni-ZAP XR |
| | | Chondrosarcoma | | | | |
| H0252 | Human Osteosarcoma | Human | Bone | | disease | Uni-ZAP XR |
| | | Osteosarcoma | | | | |
| H0253 | Human adult testis, large | Human Adult Testis | Testis | | | Uni-ZAP XR |
| | inserts | | | | | |
| H0254 | Breast Lymph node cDNA | Breast Lymph Node | Lymph | | | Uni-ZAP XR |
| | library | | Node | | | |
| H0255 | breast lymph node CDNA | Breast Lymph Node | Lymph | | | Lambda ZAP |
| | library | | Node | | | II |
| H0256 | HL-60, unstimulated | Human HL-60 | Blood | Cell Line | | Uni-ZAP XR |
| | | Cells, unstimulated | | | | |
| H0261 | H. cerebellum, Enzyme | Human Cerebellum | Brain | | | Uni-ZAP XR |
| | subtracted | | | | | |
| H0263 | human colon cancer | Human Colon | Colon | | disease | Lambda ZAP |
| | | Cancer | | | | II |
| H0264 | human tonsils | Human Tonsil | Tonsil | | | Uni-ZAP XR |
| H0265 | Activated T-Cell | T-Cells | Blood | Cell Line | | Uni-ZAP XR |
| | (12 hs)/Thiouridine | | | | | |
| | labelledEco | | | | | |
| H0266 | Human Microvascular | HMEC | Vein | Cell Line | | Lambda ZAP |
| | Endothelial Cells, fract. A | | | | | II |
| H0268 | Human Umbilical Vein | HUVE Cells | Umbilical | Cell Line | | Lambda ZAP |
| | Endothelial Cells, fract. A | | vein | | | II |
| H0270 | HPAS (human pancreas, | Human Pancreas | Pancreas | | | Uni-ZAP XR |
| | subtracted) | | | | | |
| H0271 | Human Neutrophil, | Human Neutrophil - | Blood | Cell Line | | Uni-ZAP XR |
| | Activated | Activated | | | | |
| H0272 | HUMAN TONSILS, | Human Tonsil | Tonsil | | | Uni-ZAP XR |
| | FRACTION 2 | | | | | |
| H0284 | Human OB MG63 control | Human | Bone | Cell Line | | Uni-ZAP XR |
| | fraction I | Osteoblastoma | | | | |
| | | MG63 cell line | | | | |
| H0286 | Human OB MG63 treated | Human | Bone | Cell Line | | Uni-ZAP XR |
| | (10 nM E2) fraction I | Osteoblastoma | | | | |
| | | MG63 cell line | | | | |
| H0288 | Human OB HOS control | Human | Bone | Cell Line | | Uni-ZAP XR |
| | fraction I | Osteoblastoma HOS | | | | |
| | | cell line | | | | |
| H0290 | Human OB HOS treated | Human | Bone | Cell Line | | Uni-ZAP XR |
| | (1 nM E2) fraction I | Osteoblastoma HOS | | | | |
| | | cell line | | | | |
| H0292 | Human OB HOS treated | Human | Bone | Cell Line | | Uni-ZAP XR |
| | (10 nM E2) fraction I | Osteoblastoma HOS | | | | |
| | | cell line | | | | |
| H0293 | WI 38 cells | | | | | Uni-ZAP XR |
| H0294 | Amniotic Cells - TNF | Amniotic Cells - | Placenta | Cell Line | | Uni-ZAP XR |
| | induced | TNF induced | | | | |
| H0295 | Amniotic Cells - Primary | Amniotic Cells - | Placenta | Cell Line | | Uni-ZAP XR |
| | Culture | Primary Culture | | | | |
| H0305 | CD34 positive cells (Cord | CD34 Positive Cells | Cord | | | ZAP Express |
| | Blood) | | Blood | | | |
| H0306 | CD34 depleted Buffy Coat | CD34 Depleted | Cord | | | ZAP Express |
| | (Cord Blood) | Buffy Coat (Cord | Blood | | | |
| | | Blood) | | | | |
| H0309 | Human Chronic Synovitis | Synovium, Chronic | Synovium | | disease | Uni-ZAP XR |
| | | Synovitis/ | | | | |
| | | Osteoarthritis | | | | |
| H0318 | HUMAN B CELL | Human B Cell | Lymph | | disease | Uni-ZAP XR |
| | LYMPHOMA | Lymphoma | Node | | | |
| H0320 | Human frontal cortex | Human Frontal | Brain | | | Uni-ZAP XR |
| | | Cortex | | | | |
| H0327 | human corpus colosum | Human Corpus | Brain | | | Uni-ZAP XR |
| | | Callosum | | | | |
| H0328 | human ovarian cancer | Ovarian Cancer | Ovary | | disease | Uni-ZAP XR |
| H0331 | Hepatocellular Tumor | Hepatocellular | Liver | | disease | Lambda ZAP |
| | | Tumor | | | | II |
| H0333 | Hemangiopericytoma | Hemangiopericytoma | Blood | | disease | Lambda ZAP |
| | | | vessel | | | II |
| H0340 | Corpus Callosum | Corpus Collosum- | | | | Uni-ZAP XR |
| | | 93052 | | | | |
| H0341 | Bone Marrow Cell Line | Bone Marrow Cell | Bone | Cell Line | | Uni-ZAP XR |
| | (RS4; 11) | Line RS4; 11 | Marrow | | | |
| H0351 | Glioblastoma | Glioblastoma | Brain | | disease | Uni-ZAP XR |
| H0352 | wilm''s tumor | Wilm''s Tumor | | | disease | Uni-ZAP XR |
| H0354 | Human Leukocytes | Human Leukocytes | Blood | Cell Line | | pCMVSport 1 |
| H0355 | Human Liver | Human Liver, | | | | pCMVSport 1 |
| | | normal Adult | | | | |
| H0363 | Human Brain Medulla, | Human Brain | | | | pBluescript |
| | subtracted | Medulla | | | | |
| H0369 | H. Atrophic Endometrium | Atrophic | | | | Uni-ZAP XR |
| | | Endometrium and | | | | |
| | | myometrium | | | | |
| H0370 | H. Lymph node breast | Lymph node with | | | disease | Uni-ZAP XR |
| | Cancer | Met. Breast Cancer | | | | |
| H0373 | Human Heart | Human Adult Heart | Heart | | | pCMVSport 1 |
| H0375 | Human Lung | Human Lung | | | | pCMVSport 1 |
| H0376 | Human Spleen | Human Adult | Spleen | | | pCMVSport 1 |
| | | Spleen | | | | |
| H0381 | Bone Cancer | Bone Cancer | | | disease | Uni-ZAP XR |
| H0383 | Human Prostate BPH, re- | Human Prostate | | | | Uni-ZAP XR |
| | excision | BPH | | | | |
| H0386 | Leukocyte and Lung; 4 | Human Leukocytes | Blood | Cell Line | | pCMVSport 1 |
| | screens | | | | | |
| H0392 | H. Meningima, M1 | Human Meningima | brain | | | pSport1 |
| H0393 | Fetal Liver, subtraction II | Human Fetal Liver | Liver | | | pBluescript |
| H0400 | Human Striatum | Human Brain, | Brain | | | Lambda ZAP |
| | Depression, re-rescue | Striatum Depression | | | | II |
| H0402 | CD34 depleted Buffy Coat | CD34 Depleted | Cord | | | ZAP Express |
| | (Cord Blood), re-excision | Buffy Coat (Cord | Blood | | | |
| | | Blood) | | | | |
| H0409 | H. Striatum Depression, | Human Brain, | Brain | | | pBluescript |
| | subtracted | Striatum Depression | | | | |
| H0411 | H Female Bladder, Adult | Human Female | Bladder | | | pSport1 |
| | | Adult Bladder | | | | |
| H0412 | Human umbilical vein | HUVE Cells | Umbilical | Cell Line | | pSport1 |
| | endothelial cells, IL-4 | | vein | | | |
| | induced | | | | | |
| H0413 | Human Umbilical Vein | HUVE Cells | Umbilical | Cell Line | | pSport1 |
| | Endothelial Cells, | | vein | | | |
| | uninduced | | | | | |
| H0414 | Ovarian Tumor I, OV5232 | Ovarian Tumor, | Ovary | | disease | pSport1 |
| | | OV5232 | | | | |
| H0416 | Human Neutrophils, | Human Neutrophil - | Blood | Cell Line | | pBluescript |
| | Activated, re-excision | Activated | | | | |
| H0421 | Human Bone Marrow, re- | Bone Marrow | | | | pBluescript |
| | excision | | | | | |
| H0422 | T-Cell PHA 16 hrs | T-Cells | Blood | Cell Line | | pSport1 |
| H0423 | T-Cell PHA 24 hrs | T-Cells | Blood | Cell Line | | pSport1 |
| H0424 | Human Pituitary, subt IX | Human Pituitary | | | | pBluescript |
| H0427 | Human Adipose | Human Adipose, left | | | | pSport1 |
| | | hiplipoma | | | | |
| H0428 | Human Ovary | Human Ovary | Ovary | | | pSport1 |
| | | Tumor | | | | |
| H0429 | K562 + PMA (36 hrs), re- | K562 Cell line | cell line | Cell Line | | ZAP Express |
| | excision | | | | | |
| H0431 | H. Kidney Medulla, re- | Kidney medulla | Kidney | | | pBluescript |
| | excision | | | | | |
| H0433 | Human Umbilical Vein | HUVE Cells | Umbilical | Cell Line | | pBluescript |
| | Endothelial cells, frac B, | | vein | | | |
| | re-excision | | | | | |
| H0434 | Human Brain, striatum, | Human Brain, | | | | pBluescript |
| | re-excision | Striatum | | | | |
| H0435 | Ovarian Tumor Oct. 3, 1995 | Ovarian Tumor, | Ovary | | | pCMVSport |
| | | OV350721 | | | | 2.0 |
| H0436 | Resting T-Cell Library, II | T-Cells | Blood | Cell Line | | pSport1 |
| H0437 | H Umbilical Vein | HUVE Cells | Umbilical | Cell Line | | Lambda ZAP |
| | Endothelial Cells, frac A, | | vein | | | II |
| | re-excision | | | | | |
| H0438 | H. Whole Brain #2, re- | Human Whole Brain | | | | ZAP Express |
| | excision | #2 | | | | |
| H0441 | H. Kidney Cortex, | Kidney cortex | Kidney | | | pBluescript |
| | subtracted | | | | | |
| H0442 | H. Striatum Depression, | Human Brain, | Brain | | | pBluescript |
| | subt II | Striatum Depression | | | | |
| H0445 | Spleen, Chronic | Human Spleen, CLL | Spleen | | disease | pSport1 |
| | lymphocytic leukemia | | | | | |
| H0457 | Human Eosinophils | Human Eosinophils | | | | pSport1 |
| H0459 | CD34+cells, II, | CD34 positive cells | | | | pCMVSport |
| | FRACTION 2 | | | | | 2.0 |
| H0461 | H. Kidney Medulla, | Kidney medulla | Kidney | | | pBluescript |
| | subtracted | | | | | |
| H0477 | Human Tonsil, Lib 3 | Human Tonsil | Tonsil | | | pSport1 |
| H0478 | Salivary Gland, Lib 2 | Human Salivary | Salivary | | | pSport1 |
| | | Gland | gland | | | |
| H0483 | Breast Cancer cell line, | Breast Cancer Cell | | | | pSport1 |
| | MDA 36 | line, MDA 36 | | | | |
| H0484 | Breast Cancer Cell line, | Breast Cancer Cell | | | | pSport1 |
| | angiogenic | line, Angiogenic, | | | | |
| | | 36T3 | | | | |
| H0485 | Hodgkin''s Lymphoma I | Hodgkin''s | | | disease | pCMVSport |
| | | Lymphoma I | | | | 2.0 |
| H0486 | Hodgkin''s Lymphoma II | Hodgkin''s | | | disease | pCMVSport |
| | | Lymphoma II | | | | 2.0 |
| H0488 | Human Tonsils, Lib 2 | Human Tonsils | | | | pCMVSport |
| | | | | | | 2.0 |
| H0489 | Crohn''s Disease | Ileum | Intestine | | disease | pSport1 |
| H0492 | HL-60, RA 4h, Subtracted | HL-60 Cells, RA | Blood | Cell Line | | Uni-ZAP XR |
| | | stimulated for 4H | | | | |
| H0494 | Keratinocyte | Keratinocyte | | | | pCMVSport |
| | | | | | | 2.0 |
| H0497 | HEL cell line | HEL cell line | | HEL 92.1.7 | | pSport1 |
| H0505 | Human Astrocyte | Human Astrocyte | | | | pSport1 |
| H0506 | Ulcerative Colitis | Colon | Colon | | | pSport1 |
| H0509 | Liver, Hepatoma | Human Liver, | Liver | | disease | pCMVSport |
| | | Hepatoma, patient 8 | | | | 3.0 |
| H0510 | Human Liver, normal | Human Liver, | Liver | | | pCMVSport |
| | | normal, Patient # 8 | | | | 3.0 |
| H0512 | Keratinocyte, lib 3 | Keratinocyte | | | | pCMVSport |
| | | | | | | 2.0 |
| H0518 | pBMC stimulated w/ poly | pBMC stimulated | | | | pCMVSport |
| | I/C | with poly I/C | | | | 3.0 |
| H0519 | NTERA2, control | NTERA2, | | | | pCMVSport |
| | | Teratocarcinoma | | | | 3.0 |
| | | cell line | | | | |
| H0520 | NTERA2 + retinoic acid, | NTERA2, | | | | pSport1 |
| | 14 days | Teratocarcinoma | | | | |
| | | cell line | | | | |
| H0521 | Primary Dendritic Cells, | Primary Dendritic | | | | pCMVSport |
| | lib 1 | cells | | | | 3.0 |
| H0522 | Primary Dendritic | Primary Dendritic | | | | pCMVSport |
| | cells, frac 2 | cells | | | | 3.0 |
| H0529 | Myoloid Progenitor Cell | TF-1 Cell Line; | | | | pCMVSport |
| | Line | Myoloid progenitor | | | | 3.0 |
| | | cell line | | | | |
| H0539 | Pancreas Islet Cell Tumor | Pancreas Islet Cell | Pancreas | | disease | pSport1 |
| | | Tumour | | | | |
| H0540 | Skin, burned | Skin, leg burned | Skin | | | pSport1 |
| H0542 | T Cell helper I | Helper T cell | | | | pCMVSport |
| | | | | | | 3.0 |
| H0543 | T cell helper II | Helper T cell | | | | pCMVSport |
| | | | | | | 3.0 |
| H0544 | Human endometrial | Human endometrial | | | | pCMVSport |
| | stromal cells | stromal cells | | | | 3.0 |
| H0545 | Human endometrial | Human endometrial | | | | pCMVSport |
| | stromal cells-treated with | stromal cells-treated | | | | 3.0 |
| | progesterone | with proge | | | | |
| H0546 | Human endometrial | Human endometrial | | | | pCMVSport |
| | stromal cells-treated with | stromal cells-treated | | | | 3.0 |
| | estradiol | with estra | | | | |
| H0547 | NTERA2 teratocarcinoma | NTERA2, | | | | pSport1 |
| | cell line + retinoic acid (14 | Teratocarcinoma | | | | |
| | days) | cell line | | | | |
| H0549 | H. Epididiymus, caput & | Human | | | | Uni-ZAP XR |
| | corpus | Epididiymus, caput | | | | |
| | | and corpus | | | | |
| H0550 | H. Epididiymus, cauda | Human | | | | Uni-ZAP XR |
| | | Epididiymus, cauda | | | | |
| H0551 | Human Thymus Stromal | Human Thymus | | | | pCMVSport |
| | Cells | Stromal Cells | | | | 3.0 |
| H0553 | Human Placenta | Human Placenta | | | | pCMVSport |
| | | | | | | 3.0 |
| H0555 | Rejected Kidney, lib 4 | Human Rejected | Kidney | | disease | pCMVSport |
| | | Kidney | | | | 3.0 |
| H0556 | Activated T- | T-Cells | Blood | Cell Line | | Uni-ZAP XR |
| | cell(12h)/Thiouridine-re- | | | | | |
| | excision | | | | | |
| H0559 | HL-60, PMA 4H, re- | HL-60 Cells, PMA | Blood | Cell Line | | Uni-ZAP XR |
| | excision | stimulated 4H | | | | |
| H0560 | KMH2 | KMH2 | | | | pCMVSport |
| | | | | | | 3.0 |
| H0561 | L428 | L428 | | | | pCMVSport |
| | | | | | | 3.0 |
| H0567 | Human Fetal Brain, | Human Fetal Brain | | | | pCMVSport |
| | normalized A5002F | | | | | 2.0 |
| H0569 | Human Fetal Brain, | Human Fetal Brain | | | | pCMVSport |
| | normalized CO | | | | | 2.0 |
| H0570 | Human Fetal Brain, | Human Fetal Brain | | | | pCMVSport |
| | normalized C500H | | | | | 2.0 |
| H0572 | Human Fetal Brain, | Human Fetal Brain | | | | pCMVSport |
| | normalized AC5002 | | | | | 2.0 |
| H0574 | Hepatocellular Tumor; re- | Hepatocellular | Liver | | disease | Lambda ZAP |
| | excision | Tumor | | | | II |
| H0575 | Human Adult | Human Adult | Lung | | | Uni-ZAP XR |
| | Pulmonary; re-excision | Pulmonary | | | | |
| H0580 | Dendritic cells, pooled | Pooled dendritic | | | | pCMVSport |
| | | cells | | | | 3.0 |
| H0581 | Human Bone Marrow, | Human Bone | Bone | | | pCMVSport |
| | treated | Marrow | Marrow | | | 3.0 |
| H0583 | B Cell lymphoma | B Cell Lymphoma | B Cell | | disease | pCMVSport |
| | | | | | | 3.0 |
| H0586 | Healing groin wound, 6.5 | healing groin | groin | | disease | pCMVSport |
| | hours post incision | wound, 6.5 hours | | | | 3.0 |
| | | post incision - 2/ | | | | |
| H0587 | Healing groin wound; 7.5 | Groin-Feb. 19, 1997 | groin | | disease | pCMVSport |
| | hours post incision | | | | | 3.0 |
| H0589 | CD34 positive cells (cord | CD34 Positive Cells | Cord | | | ZAP Express |
| | blood), re-ex | | Blood | | | |
| H0590 | Human adult small | Human Adult Small | Small | | | Uni-ZAP XR |
| | intestine, re-excision | Intestine | Int. | | | |
| H0591 | Human T-cell | T-Cell Lymphoma | T-Cell | | disease | Uni-ZAP XR |
| | lymphoma; re-excision | | | | | |
| H0592 | Healing groin wound - | HGS wound healing | | | disease | pCMVSport |
| | zero hr post-incision | project; abdomen | | | | 3.0 |
| | (control) | | | | | |
| H0593 | Olfactory | Olfactory epithelium | | | | pCMVSport |
| | epithelium; nasalcavity | from roof of left | | | | 3.0 |
| | | nasal cacit | | | | |
| H0594 | Human Lung Cancer; re- | Human Lung Cancer | Lung | | disease | Lambda ZAP |
| | excision | | | | | II |
| H0595 | Stomach cancer | Stomach Cancer - | | | disease | Uni-ZAP XR |
| | (human); re-excision | 5383A (human) | | | | |
| H0596 | Human Colon Cancer; re- | Human Colon | Colon | | | Lambda ZAP |
| | excision | Cancer | | | | II |
| H0597 | Human Colon; re-excision | Human Colon | | | | Lambda ZAP |
| | | | | | | II |
| H0598 | Human Stomach; re- | Human Stomach | Stomach | | | Uni-ZAP XR |
| | excision | | | | | |
| H0599 | Human Adult Heart; re- | Human Adult Heart | Heart | | | Uni-ZAP XR |
| | excision | | | | | |
| H0600 | Healing Abdomen | Abdomen | | | disease | pCMVSport |
| | wound; 70&90 min post | | | | | 3.0 |
| | incision | | | | | |
| H0601 | Healing Abdomen | Abdomen | | | disease | pCMVSport |
| | Wound; 15 days post | | | | | 3.0 |
| | incision | | | | | |
| H0604 | Human Pituitary, re- | Human Pituitary | | | | pBluescript |
| | excision | | | | | |
| H0606 | Human Primary Breast | Human Primary | Breast | | disease | Uni-ZAP XR |
| | Cancer; re-excision | Breast Cancer | | | | |
| H0608 | H. Leukocytes, control | H. Leukocytes | | | | pCMVSport 1 |
| H0610 | H. Leukocytes, | H. Leukocytes | | | | pCMVSport 1 |
| | normalized cot 5A | | | | | |
| H0613 | H. Leukocytes, normalized | H. Leukocytes | | | | pCMVSport 1 |
| | cot 5B | | | | | |
| H0615 | Human Ovarian Cancer | Ovarian Cancer | Ovary | | disease | Uni-ZAP XR |
| | Reexcision | | | | | |
| H0616 | Human Testes, Reexcision | Human Testes | Testis | | | Uni-ZAP XR |
| H0617 | Human Primary Breast | Human Primary | Breast | | disease | Uni-ZAP XR |
| | Cancer Reexcision | Breast Cancer | | | | |
| H0618 | Human Adult Testes, | Human Adult Testis | Testis | | | Uni-ZAP XR |
| | Large Inserts, Reexcision | | | | | |
| H0619 | Fetal Heart | Human Fetal Heart | Heart | | | Uni-ZAP XR |
| H0620 | Human Fetal Kidney; | Human Fetal Kidney | Kidney | | | Uni-ZAP XR |
| | Reexcision | | | | | |
| H0622 | Human Pancreas Tumor; | Human Pancreas | Pancreas | | disease | Uni-ZAP XR |
| | Reexcision | Tumor | | | | |
| H0623 | Human Umbilical Vein; | Human Umbilical | Umbilical | | | Uni-ZAP XR |
| | Reexcision | Vein Endothelial | vein | | | |
| | | Cells | | | | |
| H0624 | 12 Week Early Stage | Twelve Week Old | Embryo | | | Uni-ZAP XR |
| | Human II; Reexcision | Early Stage Human | | | | |
| H0625 | Ku 812F Basophils Line | Ku 812F Basophils | | | | pSport1 |
| H0628 | Human Pre-Differentiated | Human Pre- | | | | Uni-ZAP XR |
| | Adipocytes | Differentiated | | | | |
| | | Adipocytes | | | | |
| H0631 | Saos2, Dexamethosome | Saos2 Cell Line; | | | | pSport1 |
| | Treated | Dexamethosome | | | | |
| | | Treated | | | | |
| H0632 | Hepatocellular Tumor; re- | Hepatocellular | Liver | | | Lambda ZAP |
| | excision | Tumor | | | | II |
| H0634 | Human Testes Tumor, re- | Human Testes | Testis | | disease | Uni-ZAP XR |
| | excision | Tumor | | | | |
| H0635 | Human Activated T-Cells, | Activated T-Cells | Blood | Cell Line | | Uni-ZAP XR |
| | re-excision | | | | | |
| H0636 | Chondrocytes | Chondrocytes | | | | pSport1 |
| H0637 | Dendritic Cells From | Dentritic cells from | | | | pSport1 |
| | CD34 Cells | CD34 cells | | | | |
| H0638 | CD40 activated monocyte | CD40 activated | | | | pSport1 |
| | dendridic cells | monocyte dendridic | | | | |
| | | cells | | | | |
| H0642 | Hep G2 Cells, lambda | Hep G2 Cells | | | | Other |
| | library | | | | | |
| H0644 | Human Placenta (re- | Human Placenta | Placenta | | | Uni-ZAP XR |
| | excision) | | | | | |
| H0645 | Fetal Heart, re-excision | Human Fetal Heart | Heart | | | Uni-ZAP XR |
| H0646 | Lung, Cancer (4005313A3): | Metastatic | | | | pSport1 |
| | Invasive Poorly | squamous cell lung | | | | |
| | Differentiated Lung | carcinoma, poorly di | | | | |
| | Adenocarcinoma, | | | | | |
| H0647 | Lung, Cancer (4005163B7): | Invasive poorly | | | disease | pSport1 |
| | Invasive, Poorly Diff. | differentiated lung | | | | |
| | Adenocarcinoma, | adenocarcinoma | | | | |
| | Metastatic | | | | | |
| H0648 | Ovary, Cancer: (4004562B6) | Papillary Cstic | | | disease | pSport1 |
| | Papillary Serous | neoplasm of low | | | | |
| | Cystic Neoplasm, Low | malignant potentia | | | | |
| | Malignant Pot | | | | | |
| H0649 | Lung, Normal: (4005313B1) | Normal Lung | | | | pSport1 |
| H0650 | B-Cells | B-Cells | | | | pCMVSport |
| | | | | | | 3.0 |
| H0651 | Ovary, Normal: | Normal Ovary | | | | pSport1 |
| | (9805C040R) | | | | | |
| H0652 | Lung, Normal: (4005313B1) | Normal Lung | | | | pSport1 |
| H0656 | B-cells (unstimulated) | B-cells | | | | pSport1 |
| | | (unstimulated) | | | | |
| H0657 | B-cells (stimulated) | B-cells (stimulated) | | | | pSport1 |
| H0658 | Ovary, Cancer | 9809C332-Poorly | Ovary & | | disease | pSport1 |
| | (9809C332): Poorly | differentiate | Fallopian | | | |
| | differentiated | | Tubes | | | |
| | adenocarcinoma | | | | | |
| H0659 | Ovary, Cancer | Grade II Papillary | Ovary | | disease | pSport1 |
| | (15395A1F): Grade II | Carcinoma, Ovary | | | | |
| | Papillary Carcinoma | | | | | |
| H0660 | Ovary, Cancer: | Poorly differentiated | | | disease | pSport1 |
| | (15799A1F) Poorly | carcinoma, ovary | | | | |
| | differentiated carcinoma | | | | | |
| H0661 | Breast, Cancer: (4004943A5) | Breast cancer | | | disease | pSport1 |
| H0662 | Breast, Normal: | Normal Breast - | Breast | | | pSportt |
| | (4005522B2) | #4005522(B2) | | | | |
| H0663 | Breast, Cancer: (4005522A2) | Breast Cancer - | Breast | | disease | pSport1 |
| | | #4005522(A2) | | | | |
| H0665 | Stromal cells 3.88 | Stromal cells 3.88 | | | | pSport1 |
| H0667 | Stromal cells(HBM3.18) | Stromal cell(HBM | | | | pSport1 |
| | | 3.18) | | | | |
| H0668 | stromal cell clone 2.5 | stromal cell clone | | | | pSport1 |
| | | 2.5 | | | | |
| H0670 | Ovary, Cancer(4004650A3): | Ovarian Cancer - | | | | pSport1 |
| | Well-Differentiated | 4004650A3 | | | | |
| | Micropapillary Serous | | | | | |
| | Carcinoma | | | | | |
| H0671 | Breast, Cancer: | Breast Cancer- | | | | pSport1 |
| | (9802C02OE) | Sample # | | | | |
| | | 9802C02OE | | | | |
| H0672 | Ovary, Cancer: (4004576A8) | Ovarian | Ovary | | | pSport1 |
| | | Cancer(4004576A8) | | | | |
| H0673 | Human Prostate Cancer, | Human Prostate | Prostate | | | Uni-ZAP XR |
| | Stage B2; re-excision | Cancer, stage B2 | | | | |
| H0674 | Human Prostate Cancer, | Human Prostate | Prostate | | | Uni-ZAP XR |
| | Stage C; re-excission | Cancer, stage C | | | | |
| H0677 | TNFR degenerate oligo | B-Cells | | | | PCRII |
| H0682 | Serous Papillary | serous papillary | | | | pCMVSport |
| | Adenocarcinoma | adenocarcinoma | | | | 3.0 |
| | | (9606G304SPA3B) | | | | |
| H0684 | Serous Papillary | Ovarian Cancer- | Ovaries | | | pCMVSport |
| | Adenocarcinoma | 9810G606 | | | | 3.0 |
| H0685 | Adenocarcinoma of | Adenocarcinoma of | | | | pCMVSport |
| | Ovary, Human Cell Line, | Ovary, Human Cell | | | | 3.0 |
| | # OVCAR-3 | Line, # OVCAR- | | | | |
| H0686 | Adenocarcinoma of | Adenocarcinoma of | | | | pCMVSport |
| | Ovary, Human Cell Line | Ovary, Human Cell | | | | 3.0 |
| | | Line, # SW-626 | | | | |
| H0687 | Human normal | Human normal | Ovary | | | pCMVSport |
| | ovary(#9610G215) | ovary(#9610G215) | | | | 3.0 |
| H0688 | Human Ovarian | Human Ovarian | | | | pCMVSport |
| | Cancer(#9807G017) | cancer(#9807G017), | | | | 3.0 |
| | | mRNA from Maura | | | | |
| | | Ru | | | | |
| H0689 | Ovarian Cancer | Ovarian Cancer, | | | | pCMVSport |
| | | #9806G019 | | | | 3.0 |
| H0690 | Ovarian Cancer, # | Ovarian Cancer, | | | | pCMVSport |
| | 9702G001 | #9702G001 | | | | 3.0 |
| H0692 | BLyS Receptor from | B Cell Lymphoma | B Cell | | | pCMVSport |
| | Expression Cloning | | | | | 3.0 |
| H0694 | Prostate gland | Prostate gland, | prostate | | | pCMVSport |
| | adenocarcinoma | adenocarcinoma, | gland | | | 3.0 |
| | | mod/diff, gleason | | | | |
| S0001 | Brain frontal cortex | Brain frontal cortex | Brain | | | Lambda ZAP |
| | | | | | | II |
| S0002 | Monocyte activated | Monocyte-activated | blood | Cell Line | | Uni-ZAP XR |
| S0003 | Human Osteoclastoma | Osteoclastoma | bone | | disease | Uni-ZAP XR |
| S0006 | Neuroblastoma | Human Neural | | | disease | pCDNA |
| | | Blastoma | | | | |
| S0007 | Early Stage Human Brain | Human Fetal Brain | | | | Uni-ZAP XR |
| S0010 | Human Amygdala | Amygdala | | | | Uni-ZAP XR |
| S0011 | STROMAL - | Osteoclastoma | bone | | disease | Uni-ZAP XR |
| | OSTEOCLASTOMA | | | | | |
| S0013 | Prostate | Prostate | prostate | | | Uni-ZAP XR |
| S0022 | Human Osteoclastoma | Osteoclastoma | | | | Uni-ZAP XR |
| | Stromal Cells - | Stromal Cells | | | | |
| | unamplified | | | | | |
| S0026 | Stromal cell TF274 | stromal cell | Bone | Cell Line | | Uni-ZAP XR |
| | | | marrow | | | |
| S0027 | Smooth muscle, serum | Smooth muscle | Pulmanary | Cell Line | | Uni-ZAP XR |
| | treated | | artery | | | |
| S0028 | Smooth muscle, control | Smooth muscle | Pulmanary | Cell Line | | Uni-ZAP XR |
| | | | artery | | | |
| S0031 | Spinal cord | Spinal cord | spinal | | | Uni-ZAP XR |
| | | | cord | | | |
| S0035 | Brain medulla oblongata | Brain medulla | Brain | | | Uni-ZAP XR |
| | | oblongata | | | | |
| S0036 | Human Substantia Nigra | Human Substantia | | | | Uni-ZAP XR |
| | | Nigra | | | | |
| S0037 | Smooth muscle, IL1b | Smooth muscle | Pulmanary | Cell Line | | Uni-ZAP XR |
| | induced | | artery | | | |
| S0038 | Human Whole Brain #2 - | Human Whole Brain | | | | ZAP Express |
| | Oligo dT > 1.5 Kb | #2 | | | | |
| S0040 | Adipocytes | Human Adipocytes | | | | Uni-ZAP XR |
| | | from Osteoclastoma | | | | |
| S0044 | Prostate BPH | prostate BPH | Prostate | | disease | Uni-ZAP XR |
| S0045 | Endothelial cells-control | Endothelial cell | endothelial | Cell Line | | Uni-ZAP XR |
| | | | cell- | | | |
| | | | lung | | | |
| S0046 | Endothelial-induced | Endothelial cell | endothelial | Cell Line | | Uni-ZAP XR |
| | | | cell- | | | |
| | | | lung | | | |
| S0049 | Human Brain, Striatum | Human Brain, | | | | Uni-ZAP XR |
| | | Striatum | | | | |
| S0050 | Human Frontal Cortex, | Human Frontal | | | disease | Uni-ZAP XR |
| | Schizophrenia | Cortex, | | | | |
| | | Schizophrenia | | | | |
| S0051 | Human | Human | | | disease | Uni-ZAP XR |
| | Hypothalmus, Schizophrenia | Hypothalamus, | | | | |
| | | Schizophrenia | | | | |
| S0052 | neutrophils control | human neutrophils | blood | Cell Line | | Uni-ZAP XR |
| S0053 | Neutrophils IL-1 and LPS | human neutrophil | blood | Cell Line | | Uni-ZAP XR |
| | induced | induced | | | | |
| S0106 | STRIATUM | | BRAIN | | disease | Uni-ZAP XR |
| | DEPRESSION | | | | | |
| S0114 | Anergic T-cell | Anergic T-cell | | Cell Line | | Uni-ZAP XR |
| S0116 | Bone marrow | Bone marrow | Bone | | | Uni-ZAP XR |
| | | | marrow | | | |
| S0126 | Osteoblasts | Osteoblasts | Knee | Cell Line | | Uni-ZAP XR |
| S0132 | Epithelial-TNFa and INF | Airway Epithelial | | | | Uni-ZAP XR |
| | induced | | | | | |
| S0134 | Apoptotic T-cell | apoptotic cells | | Cell Line | | Uni-ZAP XR |
| S0136 | PERM TF274 | stromal cell | Bone | Cell Line | | Lambda ZAP |
| | | | marrow | | | II |
| S0142 | Macrophage-oxLDL | macrophage- | blood | Cell Line | | Uni-ZAP XR |
| | | oxidized LDL | | | | |
| | | treated | | | | |
| S0144 | Macrophage (GM-CSF | Macrophage (GM- | | | | Uni-ZAP XR |
| | treated) | CSF treated) | | | | |
| S0150 | LNCAP prostate cell line | LNCAP Cell Line | Prostate | Cell Line | | Uni-ZAP XR |
| S0152 | PC3 Prostate cell line | PC3 prostate cell | | | | Uni-ZAP XR |
| | | line | | | | |
| S0180 | Bone Marrow Stroma, | Bone Marrow | | | disease | Uni-ZAP XR |
| | TNF&LPS ind | Stroma, TNF & LPS | | | | |
| | | induced | | | | |
| S0182 | Human B Cell 8866 | Human B-Cell 8866 | | | | Uni-ZAP XR |
| S0190 | Prostate BPH, Lib 2, | Human Prostate | | | | pSport1 |
| | subtracted | BPH | | | | |
| S0192 | Synovial Fibroblasts | Synovial Fibroblasts | | | | pSport1 |
| | (control) | | | | | |
| S0194 | Synovial hypoxia | Synovial Fibroblasts | | | | pSport1 |
| S0196 | Synovial IL-1/TNF | Synovial Fibroblasts | | | | pSport1 |
| | stimulated | | | | | |
| S0206 | Smooth Muscle- HASTE | Smooth muscle | Pulmanary | Cell Line | | pBluescript |
| | normalized | | artery | | | |
| S0210 | Messangial cell, frac 2 | Messangial cell | | | | pSport1 |
| S0212 | Bone Marrow Stromal | Bone Marrow | | | | pSport1 |
| | Cell, untreated | Stromal | | | | |
| | | Cell, untreated | | | | |
| S0214 | Human Osteoclastoma, re- | Osteoclastoma | bone | | disease | Uni-ZAP XR |
| | excision | | | | | |
| S0216 | Neutrophils IL-1 and LPS | human neutrophil | blood | Cell Line | | Uni-ZAP XR |
| | induced | induced | | | | |
| S0218 | Apoptotic T-cell, re- | apoptotic cells | | Cell Line | | Uni-ZAP XR |
| | excision | | | | | |
| S0222 | H. Frontal | H. Brain, Frontal | Brain | | disease | Uni-ZAP XR |
| | cortex, epileptic; re- | Cortex, Epileptic | | | | |
| | excision | | | | | |
| S0242 | Synovial Fibroblasts | Synovial Fibroblasts | | | | pSport1 |
| | (Il1/TNF), subt | | | | | |
| S0250 | Human Osteoblasts II | Human Osteoblasts | Femur | | disease | pCMVSport |
| | | | | | | 2.0 |
| S0260 | Spinal Cord, re-excision | Spinal cord | spinal | | | Uni-ZAP XR |
| | | | cord | | | |
| S0276 | Synovial hypoxia-RSF | Synovial fobroblasts | Synovial | | | pSport1 |
| | subtracted | (rheumatoid) | tissue | | | |
| S0278 | H Macrophage (GM-CSF | Macrophage (GM- | | | | Uni-ZAP XR |
| | treated), re-excision | CSF treated) | | | | |
| S0280 | Human Adipose Tissue, | Human Adipose | | | | Uni-ZAP XR |
| | re-excision | Tissue | | | | |
| S0282 | Brain Frontal Cortex, re- | Brain frontal cortex | Brain | | | Lambda ZAP |
| | excision | | | | | II |
| S0300 | Frontal lobe, dementia; re- | Frontal Lobe | Brain | | | Uni-ZAP XR |
| | excision | dementia/Alzheimer''s | | | | |
| S0308 | Spleen/normal | Spleen normal | | | | pSport1 |
| S0314 | Human | Human | | | disease | pSport1 |
| | osteoarthritis; fraction I | osteoarthritic | | | | |
| | | cartilage | | | | |
| S0328 | Palate carcinoma | Palate carcinoma | Uvula | | disease | pSport1 |
| S0330 | Palate normal | Palate normal | Uvula | | | pSport1 |
| S0332 | Pharynx carcinoma | Pharynx carcinoma | Hypopharynx | | | pSport1 |
| S0342 | Adipocytes; re-excision | Human Adipocytes | | | | Uni-ZAP XR |
| | | from Osteoclastoma | | | | |
| S0344 | Macrophage-oxLDL; re- | macrophage- | blood | Cell Line | | Uni-ZAP XR |
| | excision | oxidized LDL | | | | |
| | | treated | | | | |
| S0346 | Human Amygdala; re- | Amygdala | | | | Uni-ZAP XR |
| | excision | | | | | |
| S0352 | Larynx Carcinoma | Larynx carcinoma | | | disease | pSport1 |
| S0354 | Colon Normal II | Colon Normal | Colon | | | pSport1 |
| S0356 | Colon Carcinoma | Colon Carcinoma | Colon | | disease | pSport1 |
| S0358 | Colon Normal III | Colon Normal | Colon | | | pSport1 |
| S0360 | Colon Tumor II | Colon Tumor | Colon | | disease | pSport1 |
| S0364 | Human Quadriceps | Quadriceps muscle | | | | pSport1 |
| S0366 | Human Soleus | Soleus Muscle | | | | pSport1 |
| S0374 | Normal colon | Normal colon | | | | pSport1 |
| S0376 | Colon Tumor | Colon Tumor | | | disease | pSport1 |
| S0378 | Pancreas normal PCA4 | Pancreas Normal | | | | pSport1 |
| | No | PCA4 No | | | | |
| S0380 | Pancreas Tumor PCA4 Tu | Pancreas Tumor | | | disease | pSport1 |
| | | PCA4 Tu | | | | |
| S0382 | Larynx carcinoma IV | Larynx carcinoma | | | disease | pSport1 |
| S0384 | Tongue carcinoma | Tongue carcinoma | | | disease | pSport1 |
| S0386 | Human Whole Brain, re- | Whole brain | Brain | | | ZAP Express |
| | excision | | | | | |
| S0388 | Human | Human | | | disease | Uni-ZAP XR |
| | Hypothalamus, schizophrenia, | Hypothalamus, | | | | |
| | re-excision | Schizophrenia | | | | |
| S0390 | Smooth muscle, control; | Smooth muscle | Pulmanary | Cell Line | | Uni-ZAP XR |
| | re-excision | | artery | | | |
| S0404 | Rectum normal | Rectum, normal | | | | pSport1 |
| S0406 | Rectum tumour | Rectum tumour | | | | pSport1 |
| S0408 | Colon, normal | Colon, normal | | | | pSport1 |
| S0410 | Colon, tumour | Colon, tumour | | | | pSport1 |
| S0412 | Temporal cortex- | Temporal cortex, | | | disease | Other |
| | Alzheizmer; subtracted | alzheimer | | | | |
| S0418 | CHME Cell Line; treated 5 hrs | CHME Cell Line; | | | | pCMVSport |
| | | treated | | | | 3.0 |
| S0420 | CHME Cell | CHME Cell line, | | | | pSport1 |
| | Line, untreated | untreatetd | | | | |
| S0422 | Mo7e Cell Line GM-CSF | Mo7e Cell Line | | | | pCMVSport |
| | treated (1 ng/ml) | GM-CSF treated | | | | 3.0 |
| | | (1 ng/ml) | | | | |
| S0424 | TF-1 Cell Line GM-CSF | TF-1 Cell Line | | | | pSport1 |
| | Treated | GM-CSF Treated | | | | |
| S0426 | Monocyte activated; re- | Monocyte-activated | blood | Cell Line | | Uni-ZAP XR |
| | excision | | | | | |
| S0428 | Neutrophils control; re- | human neutrophils | blood | Cell Line | | Uni-ZAP XR |
| | excision | | | | | |
| S0434 | Stomach Normal | Stomach Normal | | | disease | pSport1 |
| S0436 | Stomach Tumour | Stomach Tumour | | | disease | pSport1 |
| S0438 | Liver Normal Met5No | Liver Normal | | | | pSport1 |
| | | Met5No | | | | |
| S0440 | Liver Tumour Met 5 Tu | Liver Tumour | | | | pSport1 |
| S0442 | Colon Normal | Colon Normal | | | | pSport1 |
| S0444 | Colon Tumor | Colon Tumour | | | disease | pSport1 |
| S0452 | Thymus | Thymus | | | | pSport1 |
| S0462 | Thyroid Thyroiditis | Thyroid Thyroiditis | | | | pSport1 |
| S0472 | Lung Mesothelium | PYBT | | | | pSport1 |
| S0474 | Human blood platelets | Platelets | Blood | | | Other |
| | | | platelets | | | |
| S3012 | Smooth Muscle Serum | Smooth muscle | Pulmanary | Cell Line | | pBluescript |
| | Treated, Norm | | artery | | | |
| S3014 | Smooth muscle, serum | Smooth muscle | Pulmanary | Cell Line | | pBluescript |
| | induced, re-exc | | artery | | | |
| S6022 | H. Adipose Tissue | Human Adipose | | | | Uni-ZAP XR |
| | | Tissue | | | | |
| S6024 | Alzheimers, spongy | Alzheimer''s/Spongy | Brain | | disease | Uni-ZAP XR |
| | change | change | | | | |
| S6026 | Frontal Lobe, Dementia | Frontal Lobe | Brain | | | Uni-ZAP XR |
| | | dementia/Alzheimer''s | | | | |
| S6028 | Human Manic Depression | Human Manic | Brain | | disease | Uni-ZAP XR |
| | Tissue | depression tissue | | | | |
| T0002 | Activated T-cells | Activated T-Cell, | Blood | Cell Line | | pBluescript |
| | | PBL fraction | | | | SK− |
| T0003 | Human Fetal Lung | Human Fetal Lung | | | | pBluescript |
| | | | | | | SK− |
| T0006 | Human Pineal Gland | Human Pinneal | | | | pBluescript |
| | | Gland | | | | SK− |
| T0010 | Human Infant Brain | Human Infant Brain | | | | Other |
| T0023 | Human Pancreatic | Human Pancreatic | | | disease | pBluescript |
| | Carcinoma | Carcinoma | | | | SK− |
| T0039 | HSA 172 Cells | Human HSA172 cell | | | | pBluescript |
| | | line | | | | SK− |
| T0040 | HSC172 cells | SA172 Cells | | | | pBluescript |
| | | | | | | SK− |
| T0041 | Jurkat T-cell G1 phase | Jurkat T-cell | | | | pBluescript |
| | | | | | | SK− |
| T0042 | Jurkat T-Cell, S phase | Jurkat T-Cell Line | | | | pBluescript |
| | | | | | | SK− |
| T0048 | Human Aortic | Human Aortic | | | | pBluescript |
| | Endothelium | Endothilium | | | | SK− |
| T0049 | Aorta endothelial cells + TNF-a | Aorta endothelial | | | | pBluescript |
| | | cells | | | | SK− |
| T0060 | Human White Adipose | Human White Fat | | | | pBluescript |
| | | | | | | SK− |
| T0082 | Human Adult Retina | Human Adult Retina | | | | pBluescript |
| | | | | | | SK− |
| T0109 | Human (HCC) cell line | | | | | pBluescript |
| | liver (mouse) metastasis, | | | | | SK− |
| | remake | | | | | |
| T0110 | Human colon carcinoma | | | | | pBluescript |
| | (HCC) cell line, remake | | | | | SK− |
| T0114 | Human (Caco-2) cell line, | | | | | pBluescript |
| | adenocarcinoma, colon, | | | | | SK− |
| | remake | | | | | |
| T0115 | Human Colon Carcinoma | | | | | pBluescript |
| | (HCC) cell line | | | | | SK− |
| L0002 | Atrium cDNA library | | | | | |
| | Human heart | | | | | |
| L0005 | Clontech human aorta | | | | | |
| | polyA+ mRNA (#6572) | | | | | |
| L0021 | Human adult (K. Okubo) | | | | | |
| L0022 | Human adult lung 3″ | | | | | |
| | directed MboI cDNA | | | | | |
| L0040 | Human colon mucosa | | | | | |
| L0041 | Human epidermal | | | | | |
| | keratinocyte | | | | | |
| L0055 | Human promyelocyte | | | | | |
| L0065 | Liver HepG2 cell line. | | | | | |
| L0105 | Human aorta polyA+ | aorta | | | | |
| | (TFujiwara) | | | | | |
| L0143 | Human placenta polyA+ | placenta | | | | |
| | (TFujiwara) | | | | | |
| L0157 | Human fetal brain | | brain | | | |
| | (TFujiwara) | | | | | |
| L0163 | Human heart cDNA | | heart | | | |
| | (YNakamura) | | | | | |
| L0251 | Homo sapiens laryngeal | laryngeal cancer | | | | |
| | cancer | | | | | |
| L0351 | Infant brain, Bento Soares | | | | | BA, M13- |
| | | | | | | derived |
| L0352 | Normalized infant brain, | | | | | BA, M13- |
| | Bento Soares | | | | | derived |
| L0361 | Stratagene ovary | | ovary | | | Bluescript SK |
| | (#937217) | | | | | |
| L0362 | Stratagene ovarian cancer | | | | | Bluescript SK− |
| | (#937219) | | | | | |
| L0363 | NCI_CGAP_GC2 | germ cell tumor | | | | Bluescript SK− |
| L0364 | NCI_CGAP_GC5 | germ cell tumor | | | | Bluescript SK− |
| L0366 | Stratagene schizo brain | schizophrenic brain | | | | Bluescript SK− |
| | S11 | S-11 frontal lobe | | | | |
| L0369 | NCI_CGAP_AA1 | adrenal adenoma | adrenal | | | Bluescript SK− |
| | | | gland | | | |
| L0371 | NCI_CGAP_Br3 | breast tumor | breast | | | Bluescript SK− |
| L0372 | NCI_CGAP_Col2 | colon tumor | colon | | | Bluescript SK− |
| L0373 | NCI_CGAP_Col1 | tumor | colon | | | Bluescript SK− |
| L0374 | NCI_CGAP_Co2 | tumor | colon | | | Bluescript SK− |
| L0375 | NCI_CGAP_Kid6 | kidney tumor | kidney | | | Bluescript SK− |
| L0378 | NCI_CGAP_Lu1 | lung tumor | lung | | | Bluescript SK− |
| L0379 | NCI_CGAP_Lym3 | lymphoma | lymph | | | Bluescript SK− |
| | | | node | | | |
| L0381 | NCI_CGAP_HN4 | squamous cell | pharynx | | | Bluescript SK− |
| | | carcinoma | | | | |
| L0382 | NCI_CGAP_Pr25 | epithelium (cell line) | prostate | | | Bluescript SK− |
| L0383 | NCI_CGAP_Pr24 | invasive tumor (cell | prostate | | | Bluescript SK− |
| | | line) | | | | |
| L0387 | NCI_CGAP_GCB0 | germinal center B- | tonsil | | | Bluescript SK− |
| | | cells | | | | |
| L0388 | NCI_CGAP_HN6 | normal gingiva (cell | | | | Bluescript SK− |
| | | line from | | | | |
| | | immortalized kerati | | | | |
| L0411 | 1-NIB | | | | | Lafmid BA |
| L0427 | b4HB3MA-FT20%-Biotin | | | | | Lafmid BA |
| L0435 | Infant brain, LLNL array | | | | | lafmid BA |
| | of Dr. M. Soares 1NIB | | | | | |
| L0438 | normalized infant brain | total brain | brain | | | lafmid BA |
| | cDNA | | | | | |
| L0439 | Soares infant brain 1NIB | | whole | | | Lafmid BA |
| | | | brain | | | |
| L0455 | Human retina cDNA | retina | eye | | | lambda gt10 |
| | randomly primed | | | | | |
| | sublibrary | | | | | |
| L0456 | Human retina cDNA | retina | eye | | | lambda gt10 |
| | Tsp509I-cleaved | | | | | |
| | sublibrary | | | | | |
| L0471 | Human fetal heart, | | | | | Lambda ZAP |
| | Lambda ZAP Express | | | | | Express |
| L0475 | KG1-a Lambda Zap | | | KG1-a | | Lambda Zap |
| | Express cDNA library | | | | | Express |
| | | | | | | (Stratagene) |
| L0483 | Human pancreatic islet | | | | | Lambda |
| | | | | | | ZAPII |
| L0485 | STRATAGENE Human | skeletal muscle | leg | | | Lambda |
| | skeletal muscle cDNA | | muscle | | | ZAPII |
| | library, cat. #936215. | | | | | |
| L0499 | NCI_CGAP_HSC2 | stem cell 34+/38+ | bone | | | pAMP1 |
| | | | marrow | | | |
| L0500 | NCI_CGAP_Brn20 | oligodendroglioma | brain | | | pAMP1 |
| L0509 | NCI_CGAP_Lu26 | invasive | lung | | | pAMP1 |
| | | adenocarcinoma | | | | |
| L0512 | NCI_CGAP_Ov36 | borderline ovarian | ovary | | | pAMP1 |
| | | carcinoma | | | | |
| L0515 | NCI_CGAP_Ov32 | papillary serous | ovary | | | pAMP1 |
| | | carcinoma | | | | |
| L0517 | NCI_CGAP_Pr1 | | | | | pAMP10 |
| L0518 | NCI_CGAP_Pr2 | | | | | pAMP10 |
| L0519 | NCI_CGAP_Pr3 | | | | | pAMP10 |
| L0520 | NCI_CGAP_Alv1 | alveolar | | | | pAMP10 |
| | | rhabdomyosarcoma | | | | |
| L0521 | NCI_CGAP_Ew1 | Ewing''s sarcoma | | | | pAMP10 |
| L0526 | NCI_CGAP_Pr12 | metastatic prostate | | | | pAMP10 |
| | | bone lesion | | | | |
| L0532 | NCI_CGAP_Thy1 | thyroid | | | | pAMP10 |
| L0540 | NCI_CGAP_Pr10 | invasive prostate | prostate | | | pAMP10 |
| | | tumor | | | | |
| L0542 | NCI_CGAP_Pr11 | normal prostatic | prostate | | | pAMP10 |
| | | epithelial cells | | | | |
| L0543 | NCI_CGAP_Pr9 | normal prostatic | prostate | | | pAMP10 |
| | | epithelial cells | | | | |
| L0547 | NCI_CGAP_Pr16 | tumor | prostate | | | pAMP10 |
| L0559 | NCI_CGAP_Ov39 | papillary serous | ovary | | | pAMP10 |
| | | ovarian metastasis | | | | |
| L0564 | Jia bone marrow stroma | bone marrow stroma | | | | pBluescript |
| L0565 | Normal Human | Bone | Hip | | | pBluescript |
| | Trabecular Bone Cells | | | | | |
| L0581 | Stratagene liver (#937224) | | liver | | | pBluescript |
| | | | | | | SK |
| L0588 | Stratagene endothelial cell | | | | | pBluescript |
| | 937223 | | | | | SK− |
| L0591 | Stratagene HeLa cell s3 | | | | | pBluescript |
| | 937216 | | | | | SK− |
| L0592 | Stratagene hNT neuron | | | | | pBluescript |
| | (#937233) | | | | | SK− |
| L0593 | Stratagene | | | | | pBluescript |
| | neuroepithelium | | | | | SK− |
| | (#937231) | | | | | |
| L0594 | Stratagene | | | | | pBluescript |
| | neuroepithelium | | | | | SK− |
| | NT2RAMI 937234 | | | | | |
| L0595 | Stratagene NT2 neuronal | neuroepithelial cells | brain | | | pBluescript |
| | precursor 937230 | | | | | SK− |
| L0596 | Stratagene colon | | colon | | | pBluescript |
| | (#937204) | | | | | SK− |
| L0597 | Stratagene corneal stroma | | cornea | | | pBluescript |
| | (#937222) | | | | | SK− |
| L0598 | Morton Fetal Cochlea | cochlea | ear | | | pBluescript |
| | | | | | | SK− |
| L0599 | Stratagene lung (#937210) | | lung | | | pBluescript |
| | | | | | | SK− |
| L0601 | Stratagene pancreas | | pancreas | | | pBluescript |
| | (#937208) | | | | | SK− |
| L0603 | Stratagene placenta | | placenta | | | pBluescript |
| | (#937225) | | | | | SK− |
| L0604 | Stratagene muscle 937209 | muscle | skeletal | | | pBluescript |
| | | | muscle | | | SK− |
| L0605 | Stratagene fetal spleen | fetal spleen | spleen | | | pBluescript |
| | (#937205) | | | | | SK− |
| L0608 | Stratagene lung carcinoma | lung carcinoma | lung | NCI-H69 | | pBluescript |
| | 937218 | | | | | SK− |
| L0622 | HM1 | | | | | pcDNAII |
| | | | | | | (Invitrogen) |
| L0623 | HM3 | pectoral muscle | | | | pcDNAII |
| | | (after mastectomy) | | | | (Invitrogen) |
| L0627 | NCI_CGAP_Co1 | bulk tumor | colon | | | pCMV- |
| | | | | | | SPORT2 |
| L0629 | NCI_CGAP_Mel3 | metastatic | bowel | | | pCMV- |
| | | melanoma to bowel | (skin | | | SPORT4 |
| | | | primary) | | | |
| L0630 | NCI_CGAP_CNS1 | substantia nigra | brain | | | pCMV- |
| | | | | | | SPORT4 |
| L0634 | NCI_CGAP_Ov8 | serous | ovary | | | pCMV- |
| | | adenocarcinoma | | | | SPORT4 |
| L0637 | NCI_CGAP_Brn53 | three pooled | brain | | | pCMV- |
| | | meningiomas | | | | SPORT6 |
| L0638 | NCI_CGAP_Brn35 | tumor, 5 pooled (see | brain | | | pCMV- |
| | | description) | | | | SPORT6 |
| L0639 | NCI_CGAP_Brn52 | tumor, 5 pooled (see | brain | | | pCMV- |
| | | description) | | | | SPORT6 |
| L0640 | NCI_CGAP_Br18 | four pooled high- | breast | | | pCMV- |
| | | grade tumors, | | | | SPORT6 |
| | | including two prima | | | | |
| L0641 | NCI_CGAP_Co17 | juvenile granulosa | colon | | | pCMV- |
| | | tumor | | | | SPORT6 |
| L0642 | NCI_CGAP_Co18 | moderately | colon | | | pCMV- |
| | | differentiated | | | | SPORT6 |
| | | adenocarcinoma | | | | |
| L0643 | NCI_CGAP_Co19 | moderately | colon | | | pCMV- |
| | | differentiated | | | | SPORT6 |
| | | adenocarcinoma | | | | |
| L0644 | NCI_CGAP_Co20 | moderately | colon | | | pCMV- |
| | | differentiated | | | | SPORT6 |
| | | adenocarcinoma | | | | |
| L0645 | NCI_CGAP_Co21 | moderately | colon | | | pCMV- |
| | | differentiated | | | | SPORT6 |
| | | adenocarcinoma | | | | |
| L0646 | NCI_CGAP_Co14 | moderately- | colon | | | pCMV- |
| | | differentiated | | | | SPORT6 |
| | | adenocarcinoma | | | | |
| L0647 | NCI_CGAP_Sar4 | five pooled | connective | | | pCMV- |
| | | sarcomas, including | tissue | | | SPORT6 |
| | | myxoid liposarcoma | | | | |
| L0648 | NCI_CGAP_Eso2 | squamous cell | esophagus | | | pCMV- |
| | | carcinoma | | | | SPORT6 |
| L0649 | NCI_CGAP_GU1 | 2 pooled high-grade | genitourinary | | | pCMV- |
| | | transitional cell | tract | | | SPORT6 |
| | | tumors | | | | |
| L0650 | NCI_CGAP_Kid13 | 2 pooled Wilms'' | kidney | | | pCMV- |
| | | tumors, one primary | | | | SPORT6 |
| | | and one metast | | | | |
| L0651 | NCI_CGAP_Kid8 | renal cell tumor | kidney | | | pCMV- |
| | | | | | | SPORT6 |
| L0653 | NCI_CGAP_Lu28 | two pooled | lung | | | pCMV- |
| | | squamous cell | | | | SPORT6 |
| | | carcinomas | | | | |
| L0655 | NCI_CGAP_Lym12 | lymphoma, | lymph | | | pCMV- |
| | | follicular mixed | node | | | SPORT6 |
| | | small and large cell | | | | |
| L0657 | NCI_CGAP_Ov23 | tumor, 5 pooled (see | ovary | | | pCMV- |
| | | description) | | | | SPORT6 |
| L0659 | NCI_CGAP_Pan1 | adenocarcinoma | pancreas | | | pCMV- |
| | | | | | | SPORT6 |
| L0661 | NCI_CGAP_Mel15 | malignant | skin | | | pCMV- |
| | | melanoma, | | | | SPORT6 |
| | | metastatic to lymph | | | | |
| | | node | | | | |
| L0662 | NCI_CGAP_Gas4 | poorly differentiated | stomach | | | PCMV- |
| | | adenocarcinoma | | | | SPORT6 |
| | | with signet r | | | | |
| L0663 | NCI_CGAP_Ut2 | moderately- | uterus | | | pCMV- |
| | | differentiated | | | | SPORT6 |
| | | endometrial | | | | |
| | | adenocarcino | | | | |
| L0664 | NCI_CGAP_Ut3 | poorly-differentiated | uterus | | | pCMV- |
| | | endometrial | | | | SPORT6 |
| | | adenocarcinoma, | | | | |
| L0665 | NCI_CGAP_Ut4 | serous papillary | uterus | | | pCMV- |
| | | carcinoma, high | | | | SPORT6 |
| | | grade, 2 pooled t | | | | |
| L0666 | NCI_CGAP_Ut1 | well-differentiated | uterus | | | pCMV- |
| | | endometrial | | | | SPORT6 |
| | | adenocarcinoma, 7 | | | | |
| L0667 | NCI_CGAP_CML1 | myeloid cells, 18 | whole | | | pCMV- |
| | | pooled CML cases, | blood | | | SPORT6 |
| | | BCR/ABL rearra | | | | |
| L0697 | Testis 1 | | | | | PGEM 5zf(+) |
| L0717 | Gessler Wilms tumor | | | | | pSPORT1 |
| L0731 | Soares_pregnant_uterus_NbHPU | | uterus | | | pT7T3-Pac |
| L0738 | Human colorectal cancer | | | | | pT7T3D |
| L0740 | Soares melanocyte | melanocyte | | | | pT7T3D |
| | 2NbHM | | | | | (Pharmacia) |
| | | | | | | with a |
| | | | | | | modified |
| | | | | | | polylinker |
| L0741 | Soares adult brain | | brain | | | pT7T3D |
| | N2b4HB55Y | | | | | (Pharmacia) |
| | | | | | | with a |
| | | | | | | modified |
| | | | | | | polylinker |
| L0742 | Soares adult brain | | brain | | | pT7T3D |
| | N2b5HB55Y | | | | | (Pharmacia) |
| | | | | | | with a |
| | | | | | | modified |
| | | | | | | polylinker |
| L0743 | Soares breast 2NbHBst | | breast | | | pT7T3D |
| | | | | | | (Pharmacia) |
| | | | | | | with a |
| | | | | | | modified |
| | | | | | | polylinker |
| L0744 | Soares breast 3NbHBst | | breast | | | pT7T3D |
| | | | | | | (Pharmacia) |
| | | | | | | with a |
| | | | | | | modified |
| | | | | | | polylinker |
| L0745 | Soares retina N2b4HR | retina | eye | | | pT7T3D |
| | | | | | | (Pharmacia) |
| | | | | | | with a |
| | | | | | | modified |
| | | | | | | polylinker |
| L0746 | Soares retina N2b5HR | retina | eye | | | pT7T3D |
| | | | | | | (Pharmacia) |
| | | | | | | with a |
| | | | | | | modified |
| | | | | | | polylinker |
| L0747 | Soares_fetal_heart_NbHH19W | | heart | | | pT7T3D |
| | | | | | | (Pharmacia) |
| | | | | | | with a |
| | | | | | | modified |
| | | | | | | polylinker |
| L0748 | Soares fetal liver spleen | | Liver | | | pT7T3D |
| | 1NFLS | | and | | | (Pharmacia) |
| | | | Spleen | | | with a |
| | | | | | | modified |
| | | | | | | polylinker |
| L0749 | Soares_fetal_liver_spleen_1NFLS_S1 | | Liver | | | pT7T3D |
| | | | and | | | (Pharmacia) |
| | | | Spleen | | | with a |
| | | | | | | modified |
| | | | | | | polylinker |
| L0750 | Soares_fetal_lung_NbHL19W | | lung | | | pT7T3D |
| | | | | | | (Pharmacia) |
| | | | | | | with a |
| | | | | | | modified |
| | | | | | | polylinker |
| L0751 | Soares ovary tumor | ovarian tumor | ovary | | | pT7T3D |
| | NbHOT | | | | | (Pharmacia) |
| | | | | | | with a |
| | | | | | | modified |
| | | | | | | polylinker |
| L0752 | Soares_parathyroid_tumor_NbHPA | parathyroid tumor | parathyroid | | | pT7T3D |
| | | | gland | | | (Pharmacia) |
| | | | | | | with a |
| | | | | | | modified |
| | | | | | | polylinker |
| L0754 | Soares placenta Nb2HP | | placenta | | | pT7T3D |
| | | | | | | (Pharmacia) |
| | | | | | | with a |
| | | | | | | modified |
| | | | | | | polylinker |
| L0755 | Soares_placenta_8to9weeks_2NbHP8to9W | | placenta | | | pT7T3D |
| | | | | | | (Pharmacia) |
| | | | | | | with a |
| | | | | | | modified |
| | | | | | | polylinker |
| L0756 | Soares_multiple_sclerosis_2NbHMSP | multiple sclerosis | | | | pT7T3D |
| | | lesions | | | | (Pharmacia) |
| | | | | | | with a |
| | | | | | | modified |
| | | | | | | polylinker |
| | | | | | | V_TYPE |
| L0757 | Soares_senescent_fibroblasts_NbHSF | senescent fibroblast | | | | pT7T3D |
| | | | | | | (Pharmacia) |
| | | | | | | with a |
| | | | | | | modified |
| | | | | | | polylinker |
| | | | | | | V_TYPE |
| L0758 | Soares_testis_NHT | | | | | pT7T3D-Pac |
| | | | | | | (Pharmacia) |
| | | | | | | with a |
| | | | | | | modified |
| | | | | | | polylinker |
| L0759 | Soares_total_fetus_Nb2HF8_9w | | | | | pT7T3D-Pac |
| | | | | | | (Pharmacia) |
| | | | | | | with a |
| | | | | | | modified |
| | | | | | | polylinker |
| L0761 | NCI_CGAP_CLL1 | B-cell, chronic | | | | pT7T3D-Pac |
| | | lymphotic leukemia | | | | (Pharmacia) |
| | | | | | | with a |
| | | | | | | modified |
| | | | | | | polylinker |
| L0762 | NCI_CGAP_Br1.1 | breast | | | | pT7T3D-Pac |
| | | | | | | (Pharmacia) |
| | | | | | | with a |
| | | | | | | modified |
| | | | | | | polylinker |
| L0763 | NCI_CGAP_Br2 | breast | | | | pT7T3D-Pac |
| | | | | | | (Pharmacia) |
| | | | | | | with a |
| | | | | | | modified |
| | | | | | | polylinker |
| L0764 | NCI_CGAP_Co3 | colon | | | | pT7T3D-Pac |
| | | | | | | (Pharmacia) |
| | | | | | | with a |
| | | | | | | modified |
| | | | | | | polylinker |
| L0766 | NCI_CGAP_GCB1 | germinal center B | | | | pT7T3D-Pac |
| | | cell | | | | (Pharmacia) |
| | | | | | | with a |
| | | | | | | modified |
| | | | | | | polylinker |
| L0768 | NCI_CGAP_GC4 | pooled germ cell | | | | pT7T3D-Pac |
| | | tumors | | | | (Pharmacia) |
| | | | | | | with a |
| | | | | | | modified |
| | | | | | | polylinker |
| L0769 | NCI_CGAP_Brn25 | anaplastic | brain | | | pT7T3D-Pac |
| | | oligodendroglioma | | | | (Pharmacia) |
| | | | | | | with a |
| | | | | | | modified |
| | | | | | | polylinker |
| L0770 | NCI_CGAP_Brn23 | glioblastoma | brain | | | pT7T3D-Pac |
| | | (pooled) | | | | (Pharmacia) |
| | | | | | | with a |
| | | | | | | modified |
| | | | | | | polylinker |
| L0771 | NCI_CGAP_Co8 | adenocarcinoma | colon | | | pT7T3D-Pac |
| | | | | | | (Pharmacia) |
| | | | | | | with a |
| | | | | | | modified |
| | | | | | | polylinker |
| L0772 | NCI_CGAP_Co10 | colon tumor RER+ | colon | | | pT7T3D-Pac |
| | | | | | | (Pharmacia) |
| | | | | | | with a |
| | | | | | | modified |
| | | | | | | polylinker |
| L0773 | NCI_CGAP_Co9 | colon tumor RER+ | colon | | | pT7T3D-Pac |
| | | | | | | (Pharmacia) |
| | | | | | | with a |
| | | | | | | modified |
| | | | | | | polylinker |
| L0774 | NCI_CGAP_Kid3 | | kidney | | | pT7T3D-Pac |
| | | | | | | (Pharmacia) |
| | | | | | | with a |
| | | | | | | modified |
| | | | | | | polylinker |
| L0775 | NCI_CGAP_Kid5 | 2 pooled tumors | kidney | | | pT7T3D-Pac |
| | | (clear cell type) | | | | (Pharmacia) |
| | | | | | | with a |
| | | | | | | modified |
| | | | | | | polylinker |
| L0776 | NCI_CGAP_Lu5 | carcinoid | lung | | | pT7T3D-Pac |
| | | | | | | (Pharmacia) |
| | | | | | | with a |
| | | | | | | modified |
| | | | | | | polylinker |
| L0777 | Soares_NhHMPu_S1 | Pooled human | mixed | | | pT7T3D-Pac |
| | | melanocyte, fetal | (see | | | (Pharmacia) |
| | | heart, and pregnant | below) | | | with a |
| | | | | | | modified |
| | | | | | | polylinker |
| L0778 | Barstead pancreas | | pancreas | | | pT7T3D-Pac |
| | HPLRB1 | | | | | (Pharmacia) |
| | | | | | | with a |
| | | | | | | modified |
| | | | | | | polylinker |
| L0779 | Soares_NFL_T_GBC_S1 | | pooled | | | pT7T3D-Pac |
| | | | | | | (Pharmacia) |
| | | | | | | with a |
| | | | | | | modified |
| | | | | | | polylinker |
| L0780 | Soares_NSF_F8_9W_OT_PA_P_S1 | | pooled | | | pT7T3D-Pac |
| | | | | | | (Pharmacia) |
| | | | | | | with a |
| | | | | | | modified |
| | | | | | | polylinker |
| L0782 | NCI_CGAP_Pr21 | normal prostate | prostate | | | pT7T3D-Pac |
| | | | | | | (Pharmacia) |
| | | | | | | with a |
| | | | | | | modified |
| | | | | | | polylinker |
| L0783 | NCI_CGAP_Pr22 | normal prostate | prostate | | | pT7T3D-Pac |
| | | | | | | (Pharmacia) |
| | | | | | | with a |
| | | | | | | modified |
| | | | | | | polylinker |
| L0785 | Barstead spleen HPLRB2 | | spleen | | | pT7T3D-Pac |
| | | | | | | (Pharmacia) |
| | | | | | | with a |
| | | | | | | modified |
| | | | | | | polylinker |
| L0787 | NCI_CGAP_Sub1 | | | | | pT7T3D-Pac |
| | | | | | | (Pharmacia) |
| | | | | | | with a |
| | | | | | | modified |
| | | | | | | polylinker |
| L0788 | NCI_CGAP_Sub2 | | | | | pT7T3D-Pac |
| | | | | | | (Pharmacia) |
| | | | | | | with a |
| | | | | | | modified |
| | | | | | | polylinker |
| L0789 | NCI_CGAP_Sub3 | | | | | pT7T3D-Pac |
| | | | | | | (Pharmacia) |
| | | | | | | with a |
| | | | | | | modified |
| | | | | | | polylinker |
| L0790 | NCI_CGAP_Sub4 | | | | | pT7T3D-Pac |
| | | | | | | (Pharmacia) |
| | | | | | | with a |
| | | | | | | modified |
| | | | | | | polylinker |
| L0791 | NCI_CGAP_Sub5 | | | | | pT7T3D-Pac |
| | | | | | | (Pharmacia) |
| | | | | | | with a |
| | | | | | | modified |
| | | | | | | polylinker |
| L0792 | NCI_CGAP_Sub6 | | | | | pT7T3D-Pac |
| | | | | | | (Pharmacia) |
| | | | | | | with a |
| | | | | | | modified |
| | | | | | | polylinker |
| L0793 | NCI_CGAP_Sub7 | | | | | pT7T3D-Pac |
| | | | | | | (Pharmacia) |
| | | | | | | with a |
| | | | | | | modified |
| | | | | | | polylinker |
| L0794 | NCI_CGAP_GC6 | pooled germ cell | | | | pT7T3D-Pac |
| | | tumors | | | | (Pharmacia) |
| | | | | | | with a |
| | | | | | | modified |
| | | | | | | polylinker |
| L0796 | NCI_CGAP_Brn50 | medulloblastoma | brain | | | pT7T3D-Pac |
| | | | | | | (Pharmacia) |
| | | | | | | with a |
| | | | | | | modified |
| | | | | | | polylinker |
| L0800 | NCI_CGAP_Col6 | colon tumor, RER+ | colon | | | pT7T3D-Pac |
| | | | | | | (Pharmacia) |
| | | | | | | with a |
| | | | | | | modified |
| | | | | | | polylinker |
| L0803 | NCI_CGAP_Kid11 | | kidney | | | pT7T3D-Pac |
| | | | | | | (Pharmacia) |
| | | | | | | with a |
| | | | | | | modified |
| | | | | | | polylinker |
| L0804 | NCI_CGAP_Kid12 | 2 pooled tumors | kidney | | | pT7T3D-Pac |
| | | (clear cell type) | | | | (Pharmacia) |
| | | | | | | with a |
| | | | | | | modified |
| | | | | | | polylinker |
| L0805 | NCI_CGAP_Lu24 | carcinoid | lung | | | pT7T3D-Pac |
| | | | | | | (Pharmacia) |
| | | | | | | with a |
| | | | | | | modified |
| | | | | | | polylinker |
| L0806 | NCI_CGAP_Lu19 | squamous cell | lung | | | pT7T3D-Pac |
| | | carcinoma, poorly | | | | (Pharmacia) |
| | | differentiated (4 | | | | with a |
| | | | | | | modified |
| | | | | | | polylinker |
| L0807 | NCI_CGAP_Ov18 | fibrotheoma | ovary | | | pT7T3D-Pac |
| | | | | | | (Pharmacia) |
| | | | | | | with a |
| | | | | | | modified |
| | | | | | | polylinker |
| L0809 | NCI_CGAP_Pr28 | | prostate | | | pT7T3D-Pac |
| | | | | | | (Pharmacia) |
| | | | | | | with a |
| | | | | | | modified |
| | | | | | | polylinker |
| L4500 | NCI_CGAP_HN16 | moderate to poorly | mouth | | | pAMP 10 |
| | | differentiated | | | | |
| | | invasive carcino | | | | |
| L4501 | NCI_CGAP_Sub8 | | | | | pT7T3D-Pac |
| | | | | | | (Pharmacia) |
| | | | | | | with a |
| | | | | | | modified |
| | | | | | | polylinker |
| L4559 | NCI_CGAP_Thy3 | follicular carcinoma | thyroid | | | pCMV- |
| | | | | | | SPORT6 |
| L4763 | NCI_CGAP_HN14 | hyperplasia of | tongue | | | pAMP10 |
| | | squamous | | | | |
| | | epithelium | | | | |
| L5566 | NCI_CGAP_Brn70 | anaplastic | brain | | | pCMV- |
| | | oligodendroglioma | | | | SPORT6.ccdb |
| L5574 | NCI_CGAP_HN19 | normal epithelium | nasopharynx | | | pAMP10 |
| L5575 | NCI_CGAP_Brn65 | glioblastoma | brain | | | pCMV- |
| | | without EGFR | | | | SPORT6 |
| | | amplification | | | | |
| L5622 | NCI_CGAP_Skn3 | | skin | | | pCMV- |
| | | | | | | SPORT6 |
| L5623 | NCI_CGAP_Skn4 | squamous cell | skin | | | pCMV- |
| | | carcinoma | | | | SPORT6 |

[0303] TABLE 5

| SEQ | Cytologic | |
|---|---|---|
| ID NO: | Band or | |
| X | Chromosome: | OMIM Reference(s): |
| 96 | 12q12P-q14 | 107777 120140 123829 123940 126337 139350 |
| | | 147570 148040 148041 148043 148070 181430 |
| | | 231550 232800 252940 264700 600194 600231 |
| | | 600536 600808 600956 601284 601769 601928 |
| | | 602116 602153 |

[0304] TABLE 6

| OMIM | |
|---|---|
| Reference | Description |
| 107777 | Diabetes insipidus, nephrogenic, autosomal recessive, 222000 |
| 120140 | Achondrogenesis-hypochondrogenesis, type II |
| | Kniest dysplasia |
| | Osteoarthrosis, precocious |
| | SED congenita |
| | SMED Strudwick type |
| | Stickler syndrome, type I |
| | Wagner syndrome, type II |
| 123829 | Melanoma |
| 123940 | White sponge nevus, 193900 |
| 126337 | Myxoid liposarcoma |
| 139350 | Epidermolytic hyperkeratosis, 113800 |
| | Keratoderma, palmolantar, nonepidermolytic |
| 147570 | Interferon, immune, deficiency |
| 148040 | Epidermolysis bullosa simplex, Koebner, Dowling-Meara, and |
| | Weber-Cockayne types, 131900, 131760, 131800 |
| 148041 | Pachyonychia congenita, Jadassohn-Lewandowsky type, |
| | 167200 |
| 148043 | Meesmann corneal dystrophy, 122100 |
| 148070 | Liver disease, susceptibility to, from hepatotoxins or viruses |
| 181430 | Scapuloperoneal syndrome, myopathic type |
| 231550 | Achalasia-addisonianism-alacrimia syndrome |
| 232800 | Glycogen storage disease VII |
| 252940 | Sanfilippo syndrome, type D |
| 264700 | Pseudo-vitamin D dependency rickets 1 |
| 600194 | Ichthyosis bullosa of Siemens, 146800 |
| 600231 | Palmoplantar keratoderma, Bothnia type |
| 600536 | Myopathy, congenital |
| 600808 | Enuresis, noncturnal, 2 |
| 600956 | Persistent Mullerian duct syndrome, type II, 261550 |
| 601284 | Hereditary hemorrhagic telangiectasia-2, 600376 |
| 601769 | Osteroporosis, involutional |
| | Rickets, vitamin D-resistant, 277440 |
| 601928 | Monilethrix, 158000 |
| 602116 | Glioma |
| 602153 | Monilethrix, 158000 |

[0305] The polypeptides of the invention can be prepared in any suitable manner. Such polypeptides include isolated naturally occurring polypeptides, recombinantly produced polypeptides, synthetically produced polypeptides, or polypeptides produced by a combination of these methods. Means for preparing such polypeptides are well understood in the art.

[0306] The polypeptides may be in the form of the secreted protein, including the mature form, or may be a part of a larger protein, such as a fusion protein (see below). It is often advantageous to include an additional amino acid sequence which contains secretory or leader sequences, pro-sequences, sequences which aid in purification, such as multiple histidine residues, or an additional sequence for stability during recombinant production.

[0307] The polypeptides of the present invention are preferably provided in an isolated form, and preferably are substantially purified. A recombinantly produced version of a polypeptide, including the secreted polypeptide, can be substantially purified using techniques described herein or otherwise known in the art, such as, for example, by the one-step method described in Smith and Johnson, Gene 67:31-40 (1988). Polypeptides of the invention also can be purified from natural, synthetic or recombinant sources using techniques described herein or otherwise known in the art, such as, for example, antibodies of the invention raised against the secreted protein.

[0308] The present invention provides a polynucleotide comprising, or alternatively consisting of, the nucleic acid sequence of SEQ ID NO:X, and/or a cDNA contained in ATCC deposit Z. The present invention also provides a polypeptide comprising, or alternatively, consisting of, the polypeptide sequence of SEQ ID NO:Y and/or a polypeptide encoded by the cDNA contained in ATCC deposit Z. Polynucleotides encoding a polypeptide comprising, or alternatively consisting of the polypeptide sequence of SEQ ID NO:Y and/or a polypeptide sequence encoded by the cDNA contained in ATCC deposit Z are also encompassed by the invention.

Signal Sequences

[0309] The present invention also encompasses mature forms of the polypeptide having the polypeptide sequence of SEQ ID NO:Y and/or the polypeptide sequence encoded by the cDNA in a deposited clone. Polynucleotides encoding the mature forms (such as, for example, the polynucleotide sequence in SEQ ID NO:X and/or the polynucleotide sequence contained in the cDNA of a deposited clone) are also encompassed by the invention. According to the signal hypothesis, proteins secreted by mammalian cells have a signal or secretary leader sequence which is cleaved from the mature protein once export of the growing protein chain across the rough endoplasmic reticulum has been initiated. Most mammalian cells and even insect cells cleave secreted proteins with the same specificity. However, in some cases, cleavage of a secreted protein is not entirely uniform, which results in two or more mature species of the protein. Further, it has long been known that cleavage specificity of a secreted protein is ultimately determined by the primary structure of the complete protein, that is, it is inherent in the amino acid sequence of the polypeptide.

[0310] Methods for predicting whether a protein has a signal sequence, as well as the cleavage point for that sequence, are available. For instance, the method of McGeoch, Virus Res. 3:271-286 (1985), uses the information from a short N-terminal charged region and a subsequent uncharged region of the complete (uncleaved) protein. The method of von Heinje, Nucleic Acids Res. 14:4683-4690 (1986) uses the information from the residues surrounding the cleavage site, typically residues −13 to +2, where +1 indicates the amino terminus of the secreted protein. The accuracy of predicting the cleavage points of known mammalian secretory proteins for each of these methods is in the range of 75-80%. (von Heinje, supra.) However, the two methods do not always produce the same predicted cleavage point(s) for a given protein.

[0311] In the present case, the deduced amino acid sequence of the secreted polypeptide was analyzed by a computer program called SignalP (Henrik Nielsen et al., Protein Engineering 10: 1-6 (1997)), which predicts the cellular location of a protein based on the amino acid sequence. As part of this computational prediction of localization, the methods of McGeoch and von Heinje are incorporated. The analysis of the amino acid sequences of the secreted proteins described herein by this program provided the results shown in Table 1A.

[0312] As one of ordinary skill would appreciate, however, cleavage sites sometimes vary from organism to organism and cannot be predicted with absolute certainty. Accordingly, the present invention provides secreted polypeptides having a sequence shown in SEQ ID NO:Y which have an N-terminus beginning within 5 residues (i.e., + or −5 residues) of the predicted cleavage point. Similarly, it is also recognized that in some cases, cleavage of the signal sequence from a secreted protein is not entirely uniform, resulting in more than one secreted species. These polypeptides, and the polynucleotides encoding such polypeptides, are contemplated by the present invention.

[0313] Moreover, the signal sequence identified by the above analysis may not necessarily predict the naturally occurring signal sequence. For example, the naturally occurring signal sequence may be further upstream from the predicted signal sequence. However, it is likely that the predicted signal sequence will be capable of directing the secreted protein to the ER. Nonetheless, the present invention provides the mature protein produced by expression of the polynucleotide sequence of SEQ ID NO:X and/or the polynucleotide sequence contained in the cDNA of a deposited clone, in a mammalian cell (e.g., COS cells, as desribed below). These polypeptides, and the polynucleotides encoding such polypeptides, are contemplated by the present invention.

Polynucleotide and Polypeptide Variants

[0314] The present invention is directed to variants of the polynucleotide sequence disclosed in SEQ ID NO:X, the complementary strand thereto, and/or the cDNA sequence contained in a deposited clone.

[0315] The present invention also encompasses variants of the polypeptide sequence disclosed in SEQ ID NO:Y and/or encoded by a deposited clone. “Variant” refers to a polynucleotide or polypeptide differing from the polynucleotide or polypeptide of the present invention, but retaining essential properties thereof. Generally, variants are overall closely similar, and, in many regions, identical to the polynucleotide or polypeptide of the present invention. The present invention is also directed to nucleic acid molecules which comprise, or alternatively consist of, a nucleotide sequence which is at least 80%, 85%, 90%, 95%, 96%, 97%, 98% or 99% identical to, for example, the nucleotide coding sequence in SEQ ID NO:X or the complementary strand thereto, the nucleotide coding sequence contained in a deposited cDNA clone or the complementary strand thereto, a nucleotide sequence encoding the polypeptide of SEQ ID NO:Y, a nucleotide sequence encoding the polypeptide encoded by the cDNA contained in a deposited clone, and/or polynucleotide fragments of any of these nucleic acid molecules (e.g., those fragments described herein). Polynucleotides which hybridize to these nucleic acid molecules under stringent hybridization conditions or lower stringency conditions are also encompassed by the invention, as are polypeptides encoded by these polynucleotides.

[0316] The present invention is also directed to polypeptides which comprise, or alternatively consist of, an amino acid sequence which is at least 80%, 85%, 90%, 95%, 96%, 97%, 98%, 99% identical to, for example, the polypeptide sequence shown in SEQ ID NO:Y, the polypeptide sequence encoded by the cDNA contained in a deposited clone, and/or polypeptide fragments of any of these polypeptides (e.g., those fragments described herein).

[0317] By a nucleic acid having a nucleotide sequence at least, for example, 95% “identical” to a reference nucleotide sequence of the present invention, it is intended that the nucleotide sequence of the nucleic acid is identical to the reference sequence except that the nucleotide sequence may include up to five point mutations per each 100 nucleotides of the reference nucleotide sequence encoding the polypeptide. In other words, to obtain a nucleic acid having a nucleotide sequence at least 95% identical to a reference nucleotide sequence, up to 5% of the nucleotides in the reference sequence may be deleted or substituted with another nucleotide, or a number of nucleotides up to 5% of the total nucleotides in the reference sequence may be inserted into the reference sequence. The query sequence may be an entire sequence shown in Table 1A, the ORF (open reading frame), or any fragment specified as described herein.

[0318] As a practical matter, whether any particular nucleic acid molecule or polypeptide is at least 80%, 85%, 90%, 95%, 96%, 97%, 98% or 99% identical to a nucleotide sequence of the presence invention can be determined conventionally using known computer programs. A preferred method for determining the best overall match between a query sequence (a sequence of the present invention) and a subject sequence, also referred to as a global sequence alignment, can be determined using the FASTDB computer program based on the algorithm of Brutlag et al. (Comp. App. Biosci. 6:237-245(1990)). In a sequence alignment the query and subject sequences are both DNA sequences. An RNA sequence can be compared by converting U's to T's. The result of said global sequence alignment is in percent identity. Preferred parameters used in a FASTDB alignment of DNA sequences to calculate percent identiy are: Matrix=Unitary, k-tuple=4, Mismatch Penalty=1, Joining Penalty=30, Randomization Group Length=0, Cutoff Score=1, Gap Penalty=5, Gap Size Penalty 0.05, Window Size=500 or the lenght of the subject nucleotide sequence, whichever is shorter.

[0319] If the subject sequence is shorter than the query sequence because of 5′ or 3′ deletions, not because of internal deletions, a manual correction must be made to the results. This is because the FASTDB program does not account for 5′ and 3′ truncations of the subject sequence when calculating percent identity. For subject sequences truncated at the 5′ or 3′ ends, relative to the query sequence, the percent identity is corrected by calculating the number of bases of the query sequence that are 5′ and 3′ of the subject sequence, which are not matched/aligned, as a percent of the total bases of the query sequence. Whether a nucleotide is matched/aligned is determined by results of the FASTDB sequence alignment. This percentage is then subtracted from the percent identity, calculated by the above FASTDB program using the specified parameters, to arrive at a final percent identity score. This corrected score is what is used for the purposes of the present invention. Only bases outside the 5′ and 3′ bases of the subject sequence, as displayed by the FASTDB alignment, which are not matched/aligned with the query sequence, are calculated for the purposes of manually adjusting the percent identity score.

[0320] For example, a 90 base subject sequence is aligned to a 100 base query sequence to determine percent identity. The deletions occur at the 5′ end of the subject sequence and therefore, the FASTDB alignment does not show a matched/alignment of the first 10 bases at 5′ end. The 10 unpaired bases represent 10% of the sequence (number of bases at the 5′ and 3′ ends not matched/total number of bases in the query sequence) so 10% is subtracted from the percent identity score calculated by the FASTDB program. If the remaining 90 bases were perfectly matched the final percent identity would be 90%. In another example, a 90 base subject sequence is compared with a 100 base query sequence. This time the deletions are internal deletions so that there are no bases on the 5′ or 3′ of the subject sequence which are not matched/aligned with the query. In this case the percent identity calculated by FASTDB is not manually corrected. Once again, only bases 5′ and 3′ of the subject sequence which are not matched/aligned with the query sequence are manually corrected for. No other manual corrections are to made for the purposes of the present invention.

[0321] By a polypeptide having an amino acid sequence at least, for example, 95% “identical” to a query amino acid sequence of the present invention, it is intended that the amino acid sequence of the subject polypeptide is identical to the query sequence except that the subject polypeptide sequence may include up to five amino acid alterations per each 100 amino acids of the query amino acid sequence. In other words, to obtain a polypeptide having an amino acid sequence at least 95% identical to a query amino acid sequence, up to 5% of the amino acid residues in the subject sequence may be inserted, deleted, (indels) or substituted with another amino acid. These alterations of the reference sequence may occur at the amino or carboxy terminal positions of the reference amino acid sequence or anywhere between those terminal positions, interspersed either individually among residues in the reference sequence or in one or more contiguous groups within the reference sequence.

[0322] As a practical matter, whether any particular polypeptide is at least 80%, 85%, 90%, 95%, 96%, 97%, 98% or 99% identical to, for instance, an amino acid sequences shown in Table 1A (SEQ ID NO:Y) or to the amino acid sequence encoded by cDNA contained in a deposited clone can be determined conventionally using known computer programs. A preferred method for determing the best overall match between a query sequence (a sequence of the present invention) and a subject sequence, also referred to as a global sequence alignment, can be determined using the FASTDB computer program based on the algorithm of Brutlag et al. (Comp. App. Biosci. 6:237-245(1990)). In a sequence alignment the query and subject sequences are either both nucleotide sequences or both amino acid sequences. The result of said global sequence alignment is in percent identity. Preferred parameters used in a FASTDB amino acid alignment are: Matrix=PAM 0, k-tuple=2, Mismatch Penalty=1, Joining Penalty=20, Randomization Group Length=0, Cutoff Score=1, Window Size=sequence length, Gap Penalty=5, Gap Size Penalty=0.05, Window Size=500 or the length of the subject amino acid sequence, whichever is shorter.

[0323] If the subject sequence is shorter than the query sequence due to N- or C-terminal deletions, not because of internal deletions, a manual correction must be made to the results. This is because the FASTDB program does not account for N- and C-terminal truncations of the subject sequence when calculating global percent identity. For subject sequences truncated at the N- and C-termini, relative to the query sequence, the percent identity is corrected by calculating the number of residues of the query sequence that are N- and C-terminal of the subject sequence, which are not matched/aligned with a corresponding subject residue, as a percent of the total bases of the query sequence. Whether a residue is matched/aligned is determined by results of the FASTDB sequence alignment. This percentage is then subtracted from the percent identity, calculated by the above FASTDB program using the specified parameters, to arrive at a final percent identity score. This final percent identity score is what is used for the purposes of the present invention. Only residues to the N- and C-termini of the subject sequence, which are not matched/aligned with the query sequence, are considered for the purposes of manually adjusting the percent identity score. That is, only query residue positions outside the farthest N- and C-terminal residues of the subject sequence.

[0324] For example, a 90 amino acid residue subject sequence is aligned with a 100 residue query sequence to determine percent identity. The deletion occurs at the N-terminus of the subject sequence and therefore, the FASTDB alignment does not show a matching/alignment of the first 10 residues at the N-terminus. The 10 unpaired residues represent 10% of the sequence (number of residues at the N- and C-termini not matched/total number of residues in the query sequence) so 10% is subtracted from the percent identity score calculated by the FASTDB program. If the remaining 90 residues were perfectly matched the final percent identity would be 90%. In another example, a 90 residue subject sequence is compared with a 100 residue query sequence. This time the deletions are internal deletions so there are no residues at the N- or C-termini of the subject sequence which are not matched/aligned with the query. In this case the percent identity calculated by FASTDB is not manually corrected. Once again, only residue positions outside the N- and C-terminal ends of the subject sequence, as displayed in the FASTDB alignment, which are not matched/aligned with the query sequnce are manually corrected for. No other manual corrections are to made for the purposes of the present invention.

[0325] The variants may contain alterations in the coding regions, non-coding regions, or both. Especially preferred are polynucleotide variants containing alterations which produce silent substitutions, additions, or deletions, but do not alter the properties or activities of the encoded polypeptide. Nucleotide variants produced by silent substitutions due to the degeneracy of the genetic code are preferred. Moreover, variants in which 5-10, 1-5, or 1-2 amino acids are substituted, deleted, or added in any combination are also preferred. Polynucleotide variants can be produced for a variety of reasons, e.g., to optimize codon expression for a particular host (change codons in the human mRNA to those preferred by a bacterial host such as E. coli).

[0326] Naturally occurring variants are called “allelic variants,” and refer to one of several alternate forms of a gene occupying a given locus on a chromosome of an organism. (Genes II, Lewin, B., ed., John Wiley & Sons, New York (1985).) These allelic variants can vary at either the polynucleotide and/or polypeptide level and are included in the present invention. Alternatively, non-naturally occurring variants may be produced by mutagenesis techniques or by direct synthesis.

[0327] Using known methods of protein engineering and recombinant DNA technology, variants may be generated to improve or alter the characteristics of the polypeptides of the present invention. For instance, one or more amino acids can be deleted from the N-terminus or C-terminus of the secreted protein without substantial loss of biological function. The authors of Ron et al., J. Biol. Chem. 268: 2984-2988 (1993), reported variant KGF proteins having heparin binding activity even after deleting 3, 8, or 27 amino-terminal amino acid residues. Similarly, Interferon gamma exhibited up to ten times higher activity after deleting 8-10 amino acid residues from the carboxy terminus of this protein. (Dobeli et al., J. Biotechnology 7:199-216 (1988).)

[0328] Moreover, ample evidence demonstrates that variants often retain a biological activity similar to that of the naturally occurring protein. For example, Gayle and coworkers (J. Biol. Chem 268:22105-22111 (1993)) conducted extensive mutational analysis of human cytokine IL-1a. They used random mutagenesis to generate over 3,500 individual IL-1a mutants that averaged 2.5 amino acid changes per variant over the entire length of the molecule. Multiple mutations were examined at every possible amino acid position. The investigators found that “[most of the molecule could be altered with little effect on either [binding or biological activity].” (See, Abstract.) In fact, only 23 unique amino acid sequences, out of more than 3,500 nucleotide sequences examined, produced a protein that significantly differed in activity from wild-type.

[0329] Furthermore, even if deleting one or more amino acids from the N-terminus or C-terminus of a polypeptide results in modification or loss of one or more biological functions, other biological activities may still be retained. For example, the ability of a deletion variant to induce and/or to bind antibodies which recognize the secreted form will likely be retained when less than the majority of the residues of the secreted form are removed from the N-terminus or C-terminus. Whether a particular polypeptide lacking N- or C-terminal residues of a protein retains such immunogenic activities can readily be determined by routine methods described herein and otherwise known in the art.

[0330] Thus, the invention further includes polypeptide variants which show substantial biological activity. Such variants include deletions, insertions, inversions, repeats, and substitutions selected according to general rules known in the art so as have little effect on activity. For example, guidance concerning how to make phenotypically silent amino acid substitutions is provided in Bowie et al., Science 247:1306-1310 (1990), wherein the authors indicate that there are two main strategies for studying the tolerance of an amino acid sequence to change.

[0331] The first strategy exploits the tolerance of amino acid substitutions by natural selection during the process of evolution. By comparing amino acid sequences in different species, conserved amino acids can be identified. These conserved amino acids are likely important for protein function. In contrast, the amino acid positions where substitutions have been tolerated by natural selection indicates that these positions are not critical for protein function. Thus, positions tolerating amino acid substitution could be modified while still maintaining biological activity of the protein.

[0332] The second strategy uses genetic engineering to introduce amino acid changes at specific positions of a cloned gene to identify regions critical for protein function. For example, site directed mutagenesis or alanine-scanning mutagenesis (introduction of single alanine mutations at every residue in the molecule) can be used. (Cunningham and Wells, Science 244:1081-1085 (1989).) The resulting mutant molecules can then be tested for biological activity.

[0333] As the authors state, these two strategies have revealed that proteins are surprisingly tolerant of amino acid substitutions. The authors further indicate which amino acid changes are likely to be permissive at certain amino acid positions in the protein. For example, most buried (within the tertiary structure of the protein) amino acid residues require nonpolar side chains, whereas few features of surface side chains are generally conserved. Moreover, tolerated conservative amino acid substitutions involve replacement of the aliphatic or hydrophobic amino acids Ala, Val, Leu and Ile; replacement of the hydroxyl residues Ser and Thr; replacement of the acidic residues Asp and Glu; replacement of the amide residues Asn and Gln, replacement of the basic residues Lys, Arg, and His; replacement of the aromatic residues Phe, Tyr, and Trp, and replacement of the small-sized amino acids Ala, Ser, Thr, Met, and Gly.

[0334] Besides conservative amino acid substitution, variants of the present invention include (i) substitutions with one or more of the non-conserved amino acid residues, where the substituted amino acid residues may or may not be one encoded by the genetic code, or
[0335] (ii) substitution with one or more of amino acid residues having a substituent group, or
[0336] (iii) fusion of the mature polypeptide with another compound, such as a compound to increase the stability and/or solubility of the polypeptide (for example, polyethylene glycol), or (iv) fusion of the polypeptide with additional amino acids, such as, for example, an IgG Fc fusion region peptide, or leader or secretory sequence, or a sequence facilitating purification or (v) fusion of the polypeptide with another compound, such as albumin (including, but not limited to, recombinant albumin (see, e.g., U.S. Pat. No. 5,876,969, issued Mar. 2, 1999, EP Patent 0 413 622, and U.S. Pat. No. 5,766,883, issued Jun. 16, 1998, herein incorporated by reference in their entirety)). Such variant polypeptides are deemed to be within the scope of those skilled in the art from the teachings herein.

[0337] For example, polypeptide variants containing amino acid substitutions of charged amino acids with other charged or neutral amino acids may produce proteins with improved characteristics, such as less aggregation. Aggregation of pharmaceutical formulations both reduces activity and increases clearance due to the aggregate's immunogenic activity. (Pinckard et al., Clin. Exp. Immunol. 2:331-340 (1967); Robbins et al., Diabetes 36: 838-845 (1987); Cleland et al., Crit. Rev. Therapeutic Drug Carrier Systems 10:307-377 (1993).) A further embodiment of the invention relates to a polypeptide which comprises the amino acid sequence of the present invention having an amino acid sequence which contains at least one amino acid substitution, but not more than 50 amino acid substitutions, even more preferably, not more than 40 amino acid substitutions, still more preferably, not more than 30 amino acid substitutions, and still even more preferably, not more than 20 amino acid substitutions. Of course, in order of ever-increasing preference, it is highly preferable for a peptide or polypeptide to have an amino acid sequence which comprises the amino acid sequence of the present invention, which contains at least one, but not more than 10, 9, 8, 7, 6, 5, 4, 3, 2 or 1 amino acid substitutions. In specific embodiments, the number of additions, substitutions, and/or deletions in the amino acid sequence of the present invention or fragments thereof (e.g., the mature form and/or other fragments described herein), is 1-5, 5-10, 5-25, 5-50, 10-50 or 50-150, conservative amino acid substitutions are preferable.

Polynucleotide and Polypeptide Fragments

[0338] The present invention is also directed to polynucleotide fragments of the polynucleotides of the invention.

[0339] In the present invention, a “polynucleotide fragment” refers to a short polynucleotide having a nucleic acid sequence which: is a portion of that contained in a deposited clone, or encoding the polypeptide encoded by the cDNA in a deposited clone; is a portion of that shown in SEQ ID NO:X or the complementary strand thereto, or is a portion of a polynucleotide sequence encoding the polypeptide of SEQ ID NO:Y. The nucleotide fragments of the invention are preferably at least about 15 nt, and more preferably at least about 20 nt, still more preferably at least about 30 nt, and even more preferably, at least about 40 nt, at least about 50 nt, at least about 75 nt, or at least about 150 nt in length. A fragment “at least 20 nt in length,” for example, is intended to include 20 or more contiguous bases from the cDNA sequence contained in a deposited clone or the nucleotide sequence shown in SEQ ID NO:X. In this context “about” includes the particularly recited value, a value larger or smaller by several (5, 4, 3, 2, or 1) nucleotides, at either terminus or at both termini. These nucleotide fragments have uses that include, but are not limited to, as diagnostic probes and primers as discussed herein. Of course, larger fragments (e.g., 50, 150, 500, 600, 2000 nucleotides) are preferred.

[0340] Moreover, representative examples of polynucleotide fragments of the invention, include, for example, fragments comprising, or alternatively consisting of, a sequence from about nucleotide number 1-50, 51-100, 101-150, 151-200, 201-250, 251-300, 301-350, 351-400, 401-450, 451-500, 501-550, 551-600, 651-700, 701-750, 751-800, 800-850, 851-900, 901-950, 951-1000, 1001-1050, 1051-1100, 1101-1150, 1151-1200, 1201-1250, 1251-1300, 1301-1350, 1351-1400, 1401-1450, 1451-1500, 1501-1550, 1551-1600, 1601-1650, 1651-1700, 1701-1750, 1751-1800, 1801-1850, 1851-1900, 1901-1950, 1951-2000, or 2001 to the end of SEQ ID NO:X, or the complementary strand thereto, or the cDNA contained in a deposited clone. In this context “about” includes the particularly recited ranges, and ranges larger or smaller by several (5, 4, 3, 2, or 1) nucleotides, at either terminus or at both termini. Preferably, these fragments encode a polypeptide which has biological activity. More preferably, these polynucleotides can be used as probes or primers as discussed herein. Polynucleotides which hybridize to these nucleic acid molecules under stringent hybridization conditions or lower stringency conditions are also encompassed by the invention, as are polypeptides encoded by these polynucleotides.

[0341] In the present invention, a “polypeptide fragment” refers to an amino acid sequence which is a portion of that contained in SEQ ID NO:Y or encoded by the cDNA contained in a deposited clone. Protein (polypeptide) fragments may be “free-standing,” or comprised within a larger polypeptide of which the fragment forms a part or region, most preferably as a single continuous region. Representative examples of polypeptide fragments of the invention, include, for example, fragments comprising, or alternatively consisting of, from about amino acid number 1-20, 21-40, 41-60, 61-80, 81-100, 102-120, 121-140, 141-160, or 161 to the end of the coding region. Moreover, polypeptide fragments can be about 20, 30, 40, 50, 60, 70, 80, 90, 100, 110, 120, 130, 140, or 150 amino acids in length. In this context “about” includes the particularly recited ranges or values, and ranges or values larger or smaller by several (5, 4, 3, 2, or 1) amino acids, at either extreme or at both extremes. Polynucleotides encoding these polypeptides are also encompassed by the invention.

[0342] Preferred polypeptide fragments include the secreted protein as well as the mature form. Further preferred polypeptide fragments include the secreted protein or the mature form having a continuous series of deleted residues from the amino or the carboxy terminus, or both. For example, any number of amino acids, ranging from 1-60, can be deleted from the amino terminus of either the secreted polypeptide or the mature form. Similarly, any number of amino acids, ranging from 1-30, can be deleted from the carboxy terminus of the secreted protein or mature form. Furthermore, any combination of the above amino and carboxy terminus deletions are preferred. Similarly, polynucleotides encoding these polypeptide fragments are also preferred.

[0343] Also preferred are polypeptide and polynucleotide fragments characterized by structural or functional domains, such as fragments that comprise alpha-helix and alpha-helix forming regions, beta-sheet and beta-sheet-forming regions, turn and turn-forming regions, coil and coil-forming regions, hydrophilic regions, hydrophobic regions, alpha amphipathic regions, beta amphipathic regions, flexible regions, surface-forming regions, substrate binding region, and high antigenic index regions. Polypeptide fragments of SEQ ID NO:Y falling within conserved domains are specifically contemplated by the present invention. Moreover, polynucleotides encoding these domains are also contemplated.

[0344] Other preferred polypeptide fragments are biologically active fragments. Biologically active fragments are those exhibiting activity similar, but not necessarily identical, to an activity of the polypeptide of the present invention. The biological activity of the fragments may include an improved desired activity, or a decreased undesirable activity. Polynucleotides encoding these polypeptide fragments are also encompassed by the invention.

[0345] Preferably, the polynucleotide fragments of the invention encode a polypeptide which demonstrates a functional activity. By a polypeptide demonstrating a “functional activity” is meant, a polypeptide capable of displaying one or more known functional activities associated with a full-length (complete) polypeptide of invention protein. Such functional activities include, but are not limited to, biological activity, antigenicity [ability to bind (or compete with a polypeptide of the invention for binding) to an antibody to the polypeptide of the invention], immunogenicity (ability to generate antibody which binds to a polypeptide of the invention), ability to form multimers with polypeptides of the invention, and ability to bind to a receptor or ligand for a polypeptide of the invention.

[0346] The functional activity of polypeptides of the invention, and fragments, variants derivatives, and analogs thereof, can be assayed by various methods.

[0347] For example, in one embodiment where one is assaying for the ability to bind or compete with full-length polypeptide of the invention for binding to an antibody of the polypeptide of the invention, various immunoassays known in the art can be used, including but not limited to, competitive and non-competitive assay systems using techniques such as radioimmunoassays, ELISA (enzyme linked immunosorbent assay), “sandwich” immunoassays, immunoradiometric assays, gel diffusion precipitation reactions, immunodiffusion assays, in situ immunoassays (using colloidal gold, enzyme or radioisotope labels, for example), western blots, precipitation reactions, agglutination assays (e.g., gel agglutination assays, hemagglutination assays), complement fixation assays, immunofluorescence assays, protein A assays, and immunoelectrophoresis assays, etc. In one embodiment, antibody binding is detected by detecting a label on the primary antibody. In another embodiment, the primary antibody is detected by detecting binding of a secondary antibody or reagent to the primary antibody. In a further embodiment, the secondary antibody is labeled. Many means are known in the art for detecting binding in an immunoassay and are within the scope of the present invention.

[0348] In another embodiment, where a ligand for a polypeptide of the invention identified, or the ability of a polypeptide fragment, variant or derivative of the invention to multimerize is being evaluated, binding can be assayed, e.g., by means well-known in the art, such as, for example, reducing and non-reducing gel chromatography, protein affinity chromatography, and affinity blotting. See generally, Phizicky, E., et al., 1995, Microbiol. Rev. 59:94-123. In another embodiment, physiological correlates of binding of a polypeptide of the invention to its substrates (signal transduction) can be assayed.

[0349] In addition, assays described herein (see Examples) and otherwise known in the art may routinely be applied to measure the ability of polypeptides of the invention and fragments, variants derivatives and analogs thereof to elicit related biological activity related to that of the polypeptide of the invention (either in vitro or in vivo). Other methods will be known to the skilled artisan and are within the scope of the invention.

Epitopes and Antibodies

[0350] The present invention encompasses polypeptides comprising, or alternatively consisting of, an epitope of the polypeptide having an amino acid sequence of SEQ ID NO:Y, or an epitope of the polypeptide sequence encoded by a polynucleotide sequence contained in ATCC deposit No. Z or encoded by a polynucleotide that hybridizes to the complement of the sequence of SEQ ID NO:X or contained in ATCC deposit No. Z under stringent hybridization conditions or lower stringency hybridization conditions as defined supra. The present invention further encompasses polynucleotide sequences encoding an epitope of a polypeptide sequence of the invention (such as, for example, the sequence disclosed in SEQ ID NO:X), polynucleotide sequences of the complementary strand of a polynucleotide sequence encoding an epitope of the invention, and polynucleotide sequences which hybridize to the complementary strand under stringent hybridization conditions or lower stringency hybridization conditions defined supra.

[0351] The term “epitopes,” as used herein, refers to portions of a polypeptide having antigenic or immunogenic activity in an animal, preferably a mammal, and most preferably in a human. In a preferred embodiment, the present invention encompasses a polypeptide comprising an epitope, as well as the polynucleotide encoding this polypeptide. An “immunogenic epitope,” as used herein, is defined as a portion of a protein that elicits an antibody response in an animal, as determined by any method known in the art, for example, by the methods for generating antibodies described infra. (See, for example, Geysen et al., Proc. Natl. Acad. Sci. USA 81:3998-4002 (1983)). The term “antigenic epitope,” as used herein, is defined as a portion of a protein to which an antibody can immunospecifically bind its antigen as determined by any method well known in the art, for example, by the immunoassays described herein. Immunospecific binding excludes non-specific binding but does not necessarily exclude cross-reactivity with other antigens. Antigenic epitopes need not necessarily be immunogenic.

[0352] Fragments which function as epitopes may be produced by any conventional means. (See, e.g., Houghten, Proc. Natl. Acad. Sci. USA 82:5131-5135 (1985), further described in U.S. Pat. No. 4,631,211).

[0353] In the present invention, antigenic epitopes preferably contain a sequence of at least 4, at least 5, at least 6, at least 7, more preferably at least 8, at least 9, at least 10, at least 11, at least 12, at least 13, at least 14, at least 15, at least 20, at least 25, at least 30, at least 40, at least 50, and, most preferably, between about 15 to about 30 amino acids. Preferred polypeptides comprising immunogenic or antigenic epitopes are at least 10, 15, 20, 25, 30, 35, 40, 45, 50, 55, 60, 65, 70, 75, 80, 85, 90, 95, or 100 amino acid residues in length. Additional non-exclusive preferred antigenic epitopes include the antigenic epitopes disclosed herein, as well as portions thereof. Antigenic epitopes are useful, for example, to raise antibodies, including monoclonal antibodies, that specifically bind the epitope. Preferred antigenic epitopes include the antigenic epitopes disclosed herein, as well as any combination of two, three, four, five or more of these antigenic epitopes. Antigenic epitopes can be used as the target molecules in immunoassays. (See, for instance, Wilson et al., Cell 37:767-778 (1984); Sutcliffe et al., Science 219:660-666 (1983)).

[0354] Similarly, immunogenic epitopes can be used, for example, to induce antibodies according to methods well known in the art. (See, for instance, Sutcliffe et al., supra; Wilson et al., supra; Chow et al., Proc. Natl. Acad. Sci. USA 82:910-914; and Bittle et al., J. Gen. Virol. 66:2347-2354 (1985). Preferred immunogenic epitopes include the immunogenic epitopes disclosed herein, as well as any combination of two, three, four, five or more of these immunogenic epitopes. The polypeptides comprising one or more immunogenic epitopes may be presented for eliciting an antibody response together with a carrier protein, such as an albumin, to an animal system (such as rabbit or mouse), or, if the polypeptide is of sufficient length (at least about 25 amino acids), the polypeptide may be presented without a carrier. However, immunogenic epitopes comprising as few as 8 to 10 amino acids have been shown to be sufficient to raise antibodies capable of binding to, at the very least, linear epitopes in a denatured polypeptide (e.g., in Western blotting).

[0355] Epitope-bearing polypeptides of the present invention may be used to induce antibodies according to methods well known in the art including, but not limited to, in vivo immunization, in vitro immunization, and phage display methods. See, e.g., Sutcliffe et al., supra; Wilson et al., supra, and Bittle et al., J. Gen. Virol., 66:2347-2354 (1985). If in vivo immunization is used, animals may be immunized with free peptide; however, anti-peptide antibody titer may be boosted by coupling the peptide to a macromolecular carrier, such as keyhole limpet hemacyanin (KLH) or tetanus toxoid. For instance, peptides containing cysteine residues may be coupled to a carrier using a linker such as maleimidobenzoyl-N-hydroxysuccinimide ester (MBS), while other peptides may be coupled to carriers using a more general linking agent such as glutaraldehyde. Animals such as rabbits, rats and mice are immunized with either free or carrier-coupled peptides, for instance, by intraperitoneal and/or intradermal injection of emulsions containing about 100 μg of peptide or carrier protein and Freund's adjuvant or any other adjuvant known for stimulating an immune response. Several booster injections may be needed, for instance, at intervals of about two weeks, to provide a useful titer of anti-peptide antibody which can be detected, for example, by ELISA assay using free peptide adsorbed to a solid surface. The titer of anti-peptide antibodies in serum from an immunized animal may be increased by selection of anti-peptide antibodies, for instance, by adsorption to the peptide on a solid support and elution of the selected antibodies according to methods well known in the art.

[0356] As one of skill in the art will appreciate, and as discussed above, the polypeptides of the present invention (e.g., those comprising an immunogenic or antigenic epitope) can be fused to heterologous polypeptide sequences. For example, polypeptides of the present invention (including fragments or variants thereof), may be fused with the constant domain of immunoglobulins (IgA, IgE, IgG, IgM), or portions thereof (CH1, CH2, CH3, or any combination thereof and portions thereof, resulting in chimeric polypeptides. By way of another non-limiting example, polypeptides and/or antibodies of the present invention (including fragments or variants thereof) may be fused with albumin (including but not limited to recombinant human serum albumin or fragments or variants thereof (see, e.g., U.S. Pat. No. 5,876,969, issued Mar. 2, 1999, EP Patent 0 413 622, and U.S. Pat. No. 5,766,883, issued Jun. 16, 1998, herein incorporated by reference in their entirety)). In a preferred embodiment, polypeptides and/or antibodies of the present invention (including fragments or variants thereof) are fused with the mature form of human serum albumin (i.e., amino acids 1-585 of human serum albumin as shown in FIGS. 1 and 2 of EP Patent 0 322 094) which is herein incorporated by reference in its entirety. In another preferred embodiment, polypeptides and/or antibodies of the present invention (including fragments or variants thereof) are fused with polypeptide fragments comprising, or alternatively consisting of, amino acid residues 1-z of human serum albumin, where z is an integer from 369 to 419, as described in U.S. Pat. No. 5,766,883 herein incorporated by reference in its entirety. Polypeptides and/or antibodies of the present invention (including fragments or variants thereof) may be fused to either the N- or C-terminal end of the heterologous protein (e.g., immunoglobulin Fc polypeptide or human serum albumin polypeptide). Polynucleotides encoding fusion proteins of the invention are also encompassed by the invention.

[0357] Such fusion proteins may facilitate purification and may increase half-life in vivo. This has been shown for chimeric proteins consisting of the first two domains of the human CD4-polypeptide and various domains of the constant regions of the heavy or light chains of mammalian immunoglobulins. See, e.g., EP 394,827; Traunecker et al., Nature, 331:84-86 (1988). Enhanced delivery of an antigen across the epithelial barrier to the immune system has been demonstrated for antigens (e.g., insulin) conjugated to an FcRn binding partner such as IgG or Fc fragments (see, e.g., PCT Publications WO 96/22024 and WO 99/04813). IgG Fusion proteins that have a disulfide-linked dimeric structure due to the IgG portion desulfide bonds have also been found to be more efficient in binding and neutralizing other molecules than monomeric polypeptides or fragments thereof alone. See, e.g., Fountoulakis et al., J. Biochem., 270:3958-3964 (1995). Nucleic acids encoding the above epitopes can also be recombined with a gene of interest as an epitope tag (e.g., the hemagglutinin (“HA”) tag or flag tag) to aid in detection and purification of the expressed polypeptide. For example, a system described by Janknecht et al. allows for the ready purification of non-denatured fusion proteins expressed in human cell lines (Janknecht et al., 1991, Proc. Natl. Acad. Sci. USA 88:8972-897). In this system, the gene of interest is subcloned into a vaccinia recombination plasmid such that the open reading frame of the gene is translationally fused to an amino-terminal tag consisting of six histidine residues. The tag serves as a matrix binding domain for the fusion protein. Extracts from cells infected with the recombinant vaccinia virus are loaded onto Ni2+ nitriloacetic acid-agarose column and histidine-tagged proteins can be selectively eluted with imidazole-containing buffers.

[0358] Additional fusion proteins of the invention may be generated through the techniques of gene-shuffling, motif-shuffling, exon-shuffling, and/or codon-shuffling (collectively referred to as “DNA shuffling”). DNA shuffling may be employed to modulate the activities of polypeptides of the invention, such methods can be used to generate polypeptides with altered activity, as well as agonists and antagonists of the polypeptides. See, generally, U.S. Pat. Nos. 5,605,793; 5,811,238; 5,830,721; 5,834,252; and 5,837,458, and Patten et al., Curr. Opinion Biotechnol. 8:724-33 (1997); Harayama, Trends Biotechnol. 16(2):76-82 (1998); Hansson, et al., J. Mol. Biol. 287:265-76 (1999); and Lorenzo and Blasco, Biotechniques 24(2):308-13 (1998) (each of these patents and publications are hereby incorporated by reference in its entirety). In one embodiment, alteration of polynucleotides corresponding to SEQ ID NO:X and the polypeptides encoded by these polynucleotides may be achieved by DNA shuffling. DNA shuffling involves the assembly of two or more DNA segments by homologous or site-specific recombination to generate variation in the polynucleotide sequence. In another embodiment, polynucleotides of the invention, or the encoded polypeptides, may be altered by being subjected to random mutagenesis by error-prone PCR, random nucleotide insertion or other methods prior to recombination. In another embodiment, one or more components, motifs, sections, parts, domains, fragments, etc., of a polynucleotide encoding a polypeptide of the invention may be recombined with one or more components, motifs, sections, parts, domains, fragments, etc. of one or more heterologous molecules.

Antibodies

[0359] Further polypeptides of the invention relate to antibodies and T-cell antigen receptors (TCR) which immunospecifically bind a polypeptide, polypeptide fragment, or variant of SEQ ID NO:Y, and/or an epitope, of the present invention (as determined by immunoassays well known in the art for assaying specific antibody-antigen binding). Antibodies of the invention include, but are not limited to, polyclonal, monoclonal, multispecific, human, humanized or chimeric antibodies, single chain antibodies, Fab fragments, F(ab′) fragments, fragments produced by a Fab expression library, anti-idiotypic (anti-Id) antibodies (including, e.g., anti-Id antibodies to antibodies of the invention), and epitope-binding fragments of any of the above. The term “antibody,” as used herein, refers to immunoglobulin molecules and immunologically active portions of immunoglobulin molecules, i.e., molecules that contain an antigen binding site that immunospecifically binds an antigen. The immunoglobulin molecules of the invention can be of any type (e.g., IgG, IgE, IgM, IgD, IgA and IgY), class (e.g., IgG1, IgG2, IgG3, IgG4, IgA1 and IgA2) or subclass of immunoglobulin molecule. In preferred embodiments, the immunoglobulin molecules of the invention are IgG1. In other preferred embodiments, the immunoglobulin molecules of the invention are IgG4.

[0360] Most preferably the antibodies are human antigen-binding antibody fragments of the present invention and include, but are not limited to, Fab, Fab′ and F(ab′)2, Fd, single-chain Fvs (scFv), single-chain antibodies, disulfide-linked Fvs (sdFv) and fragments comprising either a VL or VH domain. Antigen-binding antibody fragments, including single-chain antibodies, may comprise the variable region(s) alone or in combination with the entirety or a portion of the following: hinge region, CH1, CH2, and CH3 domains. Also included in the invention are antigen-binding fragments also comprising any combination of variable region(s) with a hinge region, CH1, CH2, and CH3 domains. The antibodies of the invention may be from any animal origin including birds and mammals. Preferably, the antibodies are human, murine (e.g., mouse and rat), donkey, ship rabbit, goat, guinea pig, camel, horse, or chicken. As used herein, “human” antibodies include antibodies having the amino acid sequence of a human immunoglobulin and include antibodies isolated from human immunoglobulin libraries or from animals transgenic for one or more human immunoglobulin and that do not express endogenous immunoglobulins, as described infra and, for example in, U.S. Pat. No. 5,939,598 by Kucherlapati et al.

[0361] The antibodies of the present invention may be monospecific, bispecific, trispecific or of greater multispecificity. Multispecific antibodies may be specific for different epitopes of a polypeptide of the present invention or may be specific for both a polypeptide of the present invention as well as for a heterologous epitope, such as a heterologous polypeptide or solid support material. See, e.g., PCT publications WO 93/17715; WO 92/08802; WO 91/00360; WO 92/05793; Tutt, et al., J. Immunol. 147:60-69 (1991); U.S. Pat. Nos. 4,474,893; 4,714,681; 4,925,648; 5,573,920; 5,601,819; Kostelny et al., J. Immunol. 148:1547-1553 (1992).

[0362] Antibodies of the present invention may be described or specified in terms of the epitope(s) or portion(s) of a polypeptide of the present invention which they recognize or specifically bind. The epitope(s) or polypeptide portion(s) may be specified as described herein, e.g., by N-terminal and C-terminal positions, by size in contiguous amino acid residues, or listed in the Tables and Figures. Antibodies which specifically bind any epitope or polypeptide of the present invention may also be excluded. Therefore, the present invention includes antibodies that specifically bind polypeptides of the present invention, and allows for the exclusion of the same.

[0363] Antibodies of the present invention may also be described or specified in terms of their cross-reactivity. Antibodies that do not bind any other analog, ortholog, or homolog of a polypeptide of the present invention are included. Antibodies that bind polypeptides with at least 95%, at least 90%, at least 85%, at least 80%, at least 75%, at least 70%, at least 65%, at least 60%, at least 55%, and at least 50% identity (as calculated using methods known in the art and described herein) to a polypeptide of the present invention are also included in the present invention. In specific embodiments, antibodies of the present invention cross-react with murine, rat and/or rabbit homologs of human proteins and the corresponding epitopes thereof. Antibodies that do not bind polypeptides with less than 95%, less than 90%, less than 85%, less than 80%, less than 75%, less than 70%, less than 65%, less than 60%, less than 55%, and less than 50% identity (as calculated using methods known in the art and described herein) to a polypeptide of the present invention are also included in the present invention. In a specific embodiment, the above-described cross-reactivity is with respect to any single specific antigenic or immunogenic polypeptide, or combination(s) of 2, 3, 4, 5, or more of the specific antigenic and/or immunogenic polypeptides disclosed herein. Further included in the present invention are antibodies which bind polypeptides encoded by polynucleotides which hybridize to a polynucleotide of the present invention under stringent hybridization conditions (as described herein). Antibodies of the present invention may also be described or specified in terms of their binding affinity to a polypeptide of the invention. Preferred binding affinities include those with a dissociation constant or Kd less than 5×10⁻² M, 10⁻² M, 5×10⁻³ M, 10⁻³ M, 5×10⁻⁴ M, 10⁻⁴ M, 5×10⁻⁵ M, 10⁻⁵ M, 5×10⁻⁶ M, 10⁻⁶M, 5×10⁻⁷ M, 10⁻⁷ M, 5×10⁻⁻⁸ M, 10⁻⁸ M, 5×10⁻⁹ M, 10⁻⁹ M, 5×10⁻¹⁰ M, 10⁻¹⁰ M, 5×10⁻¹¹ M, 10⁻¹¹ M, 5×10⁻¹² M, ¹⁰⁻¹² M, 5×10⁻¹³ M, 10⁻¹³ M, 5×10⁻¹⁴ M, 10⁻¹⁴ M, 5×10⁻¹⁵ M, or 10⁻¹⁵ M.

[0364] The invention also provides antibodies that competitively inhibit binding of an antibody to an epitope of the invention as determined by any method known in the art for determining competitive binding, for example, the immunoassays described herein. In preferred embodiments, the antibody competitively inhibits binding to the epitope by at least 95%, at least 90%, at least 85%, at least 80%, at least 75%, at least 70%, at least 60%, or at least 50%.

[0365] Antibodies of the present invention may act as agonists or antagonists of the polypeptides of the present invention. For example, the present invention includes antibodies which disrupt the receptor/ligand interactions with the polypeptides of the invention either partially or fully. Preferrably, antibodies of the present invention bind an antigenic epitope disclosed herein, or a portion thereof. The invention features both receptor-specific antibodies and ligand-specific antibodies. The invention also features receptor-specific antibodies which do not prevent ligand binding but prevent receptor activation. Receptor activation (i.e., signaling) may be determined by techniques described herein or otherwise known in the art. For example, receptor activation can be determined by detecting the phosphorylation (e.g., tyrosine or serine/threonine) of the receptor or its substrate by immunoprecipitation followed by western blot analysis (for example, as described supra). In specific embodiments, antibodies are provided that inhibit ligand activity or receptor activity by at least 95%, at least 90%, at least 85%, at least 80%, at least 75%, at least 70%, at least 60%, or at least 50% of the activity in absence of the antibody.

[0366] The invention also features receptor-specific antibodies which both prevent ligand binding and receptor activation as well as antibodies that recognize the receptor-ligand complex, and, preferably, do not specifically recognize the unbound receptor or the unbound ligand. Likewise, included in the invention are neutralizing antibodies which bind the ligand and prevent binding of the ligand to the receptor, as well as antibodies which bind the ligand, thereby preventing receptor activation, but do not prevent the ligand from binding the receptor. Further included in the invention are antibodies which activate the receptor. These antibodies may act as receptor agonists, i.e., potentiate or activate either all or a subset of the biological activities of the ligand-mediated receptor activation, for example, by inducing dimerization of the receptor. The antibodies may be specified as agonists, antagonists or inverse agonists for biological activities comprising the specific biological activities of the peptides of the invention disclosed herein. The above antibody agonists can be made using methods known in the art. See, e.g., PCT publication WO 96/40281; U.S. Pat. No. 5,811,097; Deng et al., Blood 92(6):1981-1988 (1998); Chen et al., Cancer Res. 58(16):3668-3678 (1998); Harrop et al., J. Immunol. 161(4):1786-1794 (1998); Zhu et al., Cancer Res. 58(15):3209-3214 (1998); Yoon et al., J. Immunol. 160(7):3170-3179 (1998); Prat et al., J. Cell. Sci. 111(Pt2):237-247 (1998); Pitard et al., J. Immunol. Methods 205(2):177-190 (1997); Liautard et al., Cytokine 9(4):233-241 (1997); Carlson et al., J. Biol. Chem. 272(17):11295-11301 (1997); Taryman et al., Neuron 14(4):755-762 (1995); Muller et al., Structure 6(9):1153-1167 (1998); Bartunek et al., Cytokine 8(1):14-20 (1996) (which are all incorporated by reference herein in their entireties).

[0367] Antibodies of the present invention may be used, for example, but not limited to, to purify, detect, and target the polypeptides of the present invention, including both in vitro and in vivo diagnostic and therapeutic methods. For example, the antibodies have use in immunoassays for qualitatively and quantitatively measuring levels of the polypeptides of the present invention in biological samples. See, e.g., Harlow et al., Antibodies: A Laboratory Manual, (Cold Spring Harbor Laboratory Press, 2nd ed. 1988) (incorporated by reference herein in its entirety).

[0368] As discussed in more detail below, the antibodies of the present invention may be used either alone or in combination with other compositions. The antibodies may further be recombinantly fused to a heterologous polypeptide at the N- or C-terminus or chemically conjugated (including covalently and non-covalently conjugations) to polypeptides or other compositions. For example, antibodies of the present invention may be recombinantly fused or conjugated to molecules useful as labels in detection assays and effector molecules such as heterologous polypeptides, drugs, radionuclides, or toxins. See, e.g., PCT publications WO 92/08495; WO 91/14438; WO 89/12624; U.S. Pat. No. 5,314,995; and EP 396,387.

[0369] The antibodies of the invention include derivatives that are modified, i.e, by the covalent attachment of any type of molecule to the antibody such that covalent attachment does not prevent the antibody from generating an anti-idiotypic response. For example, but not by way of limitation, the antibody derivatives include antibodies that have been modified, e.g., by glycosylation, acetylation, pegylation, phosphylation, amidation, derivatization by known protecting/blocking groups, proteolytic cleavage, linkage to a cellular ligand or other protein, etc. Any of numerous chemical modifications may be carried out by known techniques, including, but not limited to specific chemical cleavage, acetylation, formylation, metabolic synthesis of tunicamycin, etc. Additionally, the derivative may contain one or more non-classical amino acids.

[0370] The antibodies of the present invention may be generated by any suitable method known in the art. Polyclonal antibodies to an antigen-of-interest can be produced by various procedures well known in the art. For example, a polypeptide of the invention can be administered to various host animals including, but not limited to, rabbits, mice, rats, etc. to induce the production of sera containing polyclonal antibodies specific for the antigen. Various adjuvants may be used to increase the immunological response, depending on the host species, and include but are not limited to, Freund's (complete and incomplete), mineral gels such as aluminum hydroxide, surface active substances such as lysolecithin, pluronic polyols, polyanions, peptides, oil emulsions, keyhole limpet hemocyanins, dinitrophenol, and potentially useful human adjuvants such as BCG (bacille Calmette-Guerin) and corynebacterium parvum. Such adjuvants are also well known in the art.

[0371] Monoclonal antibodies can be prepared using a wide variety of techniques known in the art including the use of hybridoma, recombinant, and phage display technologies, or a combination thereof. For example, monoclonal antibodies can be produced using hybridoma techniques including those known in the art and taught, for example, in Harlow et al., Antibodies: A Laboratory Manual, (Cold Spring Harbor Laboratory Press, 2nd ed. 1988); Hammerling, et al., in: Monoclonal Antibodies and T-Cell Hybridomas 563-681 (Elsevier, N.Y., 1981) (said references incorporated by reference in their entireties). The term “monoclonal antibody” as used herein is not limited to antibodies produced through hybridoma technology. The term “monoclonal antibody” refers to an antibody that is derived from a single clone, including any eukaryotic, prokaryotic, or phage clone, and not the method by which it is produced.

[0372] Methods for producing and screening for specific antibodies using hybridoma technology are routine and well known in the art and are discussed in detail in the Examples (e.g., Example 16). In a non-limiting example, mice can be immunized with a polypeptide of the invention or a cell expressing such peptide. Once an immune response is detected, e.g., antibodies specific for the antigen are detected in the mouse serum, the mouse spleen is harvested and splenocytes isolated. The splenocytes are then fused by well known techniques to any suitable myeloma cells, for example cells from cell line SP20 available from the ATCC. Hybridomas are selected and cloned by limited dilution. The hybridoma clones are then assayed by methods known in the art for cells that secrete antibodies capable of binding a polypeptide of the invention. Ascites fluid, which generally contains high levels of antibodies, can be generated by immunizing mice with positive hybridoma clones.

[0373] Accordingly, the present invention provides methods of generating monoclonal antibodies as well as antibodies produced by the method comprising culturing a hybridoma cell secreting an antibody of the invention wherein, preferably, the hybridoma is generated by fusing splenocytes isolated from a mouse immunized with an antigen of the invention with myeloma cells and then screening the hybridomas resulting from the fusion for hybridoma clones that secrete an antibody able to bind a polypeptide of the invention.

[0374] Antibody fragments which recognize specific epitopes may be generated by known techniques. For example, Fab and F(ab′)2 fragments of the invention may be produced by proteolytic cleavage of immunoglobulin molecules, using enzymes such as papain (to produce Fab fragments) or pepsin (to produce F(ab′)2 fragments). F(ab′)2 fragments contain the variable region, the light chain constant region and the CH1 domain of the heavy chain.

[0375] For example, the antibodies of the present invention can also be generated using various phage display methods known in the art. In phage display methods, functional antibody domains are displayed on the surface of phage particles which carry the polynucleotide sequences encoding them. In a particular embodiment, such phage can be utilized to display antigen binding domains expressed from a repertoire or combinatorial antibody library (e.g., human or murine). Phage expressing an antigen binding domain that binds the antigen of interest can be selected or identified with antigen, e.g., using labeled antigen or antigen bound or captured to a solid surface or bead. Phage used in these methods are typically filamentous phage including fd and M13 binding domains expressed from phage with Fab, Fv or disulfide stabilized Fv antibody domains recombinantly fused to either the phage gene III or gene VIII protein. Examples of phage display methods that can be used to make the antibodies of the present invention include those disclosed in Brinkman et al., J. Immunol. Methods 182:41-50 (1995); Ames et al., J. Immunol. Methods 184:177-186 (1995); Kettleborough et al., Eur. J. Immunol. 24:952-958 (1994); Persic et al., Gene 187 9-18 (1997); Burton et al., Advances in Immunology 57:191-280 (1994); PCT application No. PCT/GB91/01134; PCT publications WO 90/02809; WO 91/10737; WO 92/01047; WO 92/18619; WO 93/11236; WO 95/15982; WO 95/20401; and U.S. Pat. Nos. 5,698,426; 5,223,409; 5,403,484; 5,580,717; 5,427,908; 5,750,753; 5,821,047; 5,571,698; 5,427,908; 5,516,637; 5,780,225; 5,658,727; 5,733,743 and 5,969,108; each of which is incorporated herein by reference in its entirety.

[0376] As described in the above references, after phage selection, the antibody coding regions from the phage can be isolated and used to generate whole antibodies, including human antibodies, or any other desired antigen binding fragment, and expressed in any desired host, including mammalian cells, insect cells, plant cells, yeast, and bacteria, e.g., as described in detail below. For example, techniques to recombinantly produce Fab, Fab′ and F(ab′)2 fragments can also be employed using methods known in the art such as those disclosed in PCT publication WO 92/22324; Mullinax et al., BioTechniques 12(6):864-869 (1992); and Sawai et al., AJRI 34:26-34 (1995); and Better et al., Science 240:1041-1043 (1988) (said references incorporated by reference in their entireties).

[0377] Examples of techniques which can be used to produce single-chain Fvs and antibodies include those described in U.S. Pat. Nos. 4,946,778 and 5,258,498; Huston et al., Methods in Enzymology 203:46-88 (1991); Shu et al., PNAS 90:7995-7999 (1993); and Skerra et al., Science 240:1038-1040 (1988). For some uses, including in vivo use of antibodies in humans and in vitro detection assays, it may be preferable to use chimeric, humanized, or human antibodies. A chimeric antibody is a molecule in which different portions of the antibody are derived from different animal species, such as antibodies having a variable region derived from a murine monoclonal antibody and a human immunoglobulin constant region. Methods for producing chimeric antibodies are known in the art. See e.g., Morrison, Science 229:1202 (1985); Oi et al., BioTechniques 4:214 (1986); Gillies et al., (1989) J. Immunol. Methods 125:191-202; U.S. Pat. Nos. 5,807,715; 4,816,567; and 4,816,397, which are incorporated herein by reference in their entirety. Humanized antibodies are antibody molecules from non-human species antibody that binds the desired antigen having one or more complementarity determining regions (CDRs) from the non-human species and a framework regions from a human immunoglobulin molecule. Often, framework residues in the human framework regions will be substituted with the corresponding residue from the CDR donor antibody to alter, preferably improve, antigen binding. These framework substitutions are identified by methods well known in the art, e.g., by modeling of the interactions of the CDR and framework residues to identify framework residues important for antigen binding and sequence comparison to identify unusual framework residues at particular positions. (See, e.g., Queen et al., U.S. Pat. No. 5,585,089; Riechmann et al., Nature 332:323 (1988), which are incorporated herein by reference in their entireties.) Antibodies can be humanized using a variety of techniques known in the art including, for example, CDR-grafting (EP 239,400; PCT publication WO 91/09967; U.S. Pat. Nos. 5,225,539; 5,530,101; and 5,585,089), veneering or resurfacing (EP 592,106; EP 519,596; Padlan, Molecular Immunology 28(4/5):489-498 (1991); Studnicka et al., Protein Engineering 7(6):805-814 (1994); Roguska. et al., PNAS 91:969-973 (1994)), and chain shuffling (U.S. Pat. No. 5,565,332).

[0378] Completely human antibodies are particularly desirable for therapeutic treatment of human patients. Human antibodies can be made by a variety of methods known in the art including phage display methods described above using antibody libraries derived from human immunoglobulin sequences. See also, U.S. Pat. Nos. 4,444,887 and 4,716,111; and PCT publications WO 98/46645, WO 98/50433, WO 98/24893, WO 98/16654, WO 96/34096, WO 96/33735, and WO 91/10741; each of which is incorporated herein by reference in its entirety.

[0379] Human antibodies can also be produced using transgenic mice which are incapable of expressing functional endogenous immunoglobulins, but which can express human immunoglobulin genes. For example, the human heavy and light chain immunoglobulin gene complexes may be introduced randomly or by homologous recombination into mouse embryonic stem cells. Alternatively, the human variable region, constant region, and diversity region may be introduced into mouse embryonic stem cells in addition to the human heavy and light chain genes. The mouse heavy and light chain immunoglobulin genes may be rendered non-functional separately or simultaneously with the introduction of human immunoglobulin loci by homologous recombination. In particular, homozygous deletion of the JH region prevents endogenous antibody production. The modified embryonic stem cells are expanded and microinjected into blastocysts to produce chimeric mice. The chimeric mice are then bred to produce homozygous offspring which express human antibodies. The transgenic mice are immunized in the normal fashion with a selected antigen, e.g., all or a portion of a polypeptide of the invention. Monoclonal antibodies directed against the antigen can be obtained from the immunized, transgenic mice using conventional hybridoma technology. The human immunoglobulin transgenes harbored by the transgenic mice rearrange during B cell differentiation, and subsequently undergo class switching and somatic mutation. Thus, using such a technique, it is possible to produce therapeutically useful IgG, IgA, IgM and IgE antibodies. For an overview of this technology for producing human antibodies, see Lonberg and Huszar, Int. Rev. Immunol. 13:65-93 (1995). For a detailed discussion of this technology for producing human antibodies and human monoclonal antibodies and protocols for producing such antibodies, see, e.g., PCT publications WO 98/24893; WO 92/01047; WO 96/34096; WO 96/33735; European Patent No. 0 598 877; U.S. Pat. Nos. 5,413,923; 5,625,126; 5,633,425; 5,569,825; 5,661,016; 5,545,806; 5,814,318; 5,885,793; 5,916,771; and 5,939,598, which are incorporated by reference herein in their entirety. In addition, companies such as Abgenix, Inc. (Freemont, Calif.) and Genpharm (San Jose, Calif.) can be engaged to provide human antibodies directed against a selected antigen using technology similar to that described above.

[0380] Completely human antibodies which recognize a selected epitope can be generated using a technique referred to as “guided selection.” In this approach a selected non-human monoclonal antibody, e.g., a mouse antibody, is used to guide the selection of a completely human antibody recognizing the same epitope. (Jespers et al., Bio/technology 12:899-903 (1988)).

[0381] Further, antibodies to the polypeptides of the invention can, in turn, be utilized to generate anti-idiotype antibodies that “mimic” polypeptides of the invention using techniques well known to those skilled in the art. (See, e.g., Greenspan & Bona, FASEB J. 7(5):437-444; (1989) and Nissinoff, J. Immunol. 147(8):2429-2438 (1991)). For example, antibodies which bind to and competitively inhibit polypeptide multimerization and/or binding of a polypeptide of the invention to a ligand can be used to generate anti-idiotypes that “mimic” the polypeptide multimerization and/or binding domain and, as a consequence, bind to and neutralize polypeptide and/or its ligand. Such neutralizing anti-idiotypes or Fab fragments of such anti-idiotypes can be used in therapeutic regimens to neutralize polypeptide ligand. For example, such anti-idiotypic antibodies can be used to bind a polypeptide of the invention and/or to bind its ligands/receptors, and thereby block its biological activity.

Polynucleotides Encoding Antibodies

[0382] The invention further provides polynucleotides comprising a nucleotide sequence encoding an antibody of the invention and fragments thereof. The invention also encompasses polynucleotides that hybridize under stringent or lower stringency hybridization conditions, e.g., as defined supra, to polynucleotides that encode an antibody, preferably, that specifically binds to a polypeptide of the invention, preferably, an antibody that binds to a polypeptide having the amino acid sequence of SEQ ID NO:Y.

[0383] The polynucleotides may be obtained, and the nucleotide sequence of the polynucleotides determined, by any method known in the art. For example, if the nucleotide sequence of the antibody is known, a polynucleotide encoding the antibody may be assembled from chemically synthesized oligonucleotides (e.g., as described in Kutmeier et al., BioTechniques 17:242 (1994)), which, briefly, involves the synthesis of overlapping oligonucleotides containing portions of the sequence encoding the antibody, annealing and ligating of those oligonucleotides, and then amplification of the ligated oligonucleotides by PCR.

[0384] Alternatively, a polynucleotide encoding an antibody may be generated from nucleic acid from a suitable source. If a clone containing a nucleic acid encoding a particular antibody is not available, but the sequence of the antibody molecule is known, a nucleic acid encoding the immunoglobulin may be chemically synthesized or obtained from a suitable source (e.g., an antibody cDNA library, or a cDNA library generated from, or nucleic acid, preferably poly A+ RNA, isolated from, any tissue or cells expressing the antibody, such as hybridoma cells selected to express an antibody of the invention) by PCR amplification using synthetic primers hybridizable to the 3′ and 5′ ends of the sequence or by cloning using an oligonucleotide probe specific for the particular gene sequence to identify, e.g., a cDNA clone from a cDNA library that encodes the antibody. Amplified nucleic acids generated by PCR may then be cloned into replicable cloning vectors using any method well known in the art.

[0385] Once the nucleotide sequence and corresponding amino acid sequence of the antibody is determined, the nucleotide sequence of the antibody may be manipulated using methods well known in the art for the manipulation of nucleotide sequences, e.g., recombinant DNA techniques, site directed mutagenesis, PCR, etc. (see, for example, the techniques described in Sambrook et al., 1990, Molecular Cloning, A Laboratory Manual, 2d Ed., Cold Spring Harbor Laboratory, Cold Spring Harbor, N.Y. and Ausubel et al., eds., 1998, Current Protocols in Molecular Biology, John Wiley & Sons, NY, which are both incorporated by reference herein in their entireties), to generate antibodies having a different amino acid sequence, for example to create amino acid substitutions, deletions, and/or insertions.

[0386] In a specific embodiment, the amino acid sequence of the heavy and/or light chain variable domains may be inspected to identify the sequences of the complementarity determining regions (CDRs) by methods that are well know in the art, e.g., by comparison to known amino acid sequences of other heavy and light chain variable regions to determine the regions of sequence hypervariability. Using routine recombinant DNA techniques, one or more of the CDRs may be inserted within framework regions, e.g., into human framework regions to humanize a non-human antibody, as described supra. The framework regions may be naturally occurring or consensus framework regions, and preferably human framework regions (see, e.g., Chothia et al., J. Mol. Biol. 278: 457-479 (1998) for a listing of human framework regions). Preferably, the polynucleotide generated by the combination of the framework regions and CDRs encodes an antibody that specifically binds a polypeptide of the invention. Preferably, as discussed supra, one or more amino acid substitutions may be made within the framework regions, and, preferably, the amino acid substitutions improve binding of the antibody to its antigen. Additionally, such methods may be used to make amino acid substitutions or deletions of one or more variable region cysteine residues participating in an intrachain disulfide bond to generate antibody molecules lacking one or more intrachain disulfide bonds. Other alterations to the polynucleotide are encompassed by the present invention and within the skill of the art.

[0387] In addition, techniques developed for the production of “chimeric antibodies” (Morrison et al., Proc. Natl. Acad. Sci. 81:851-855 (1984); Neuberger et al., Nature 312:604-608 (1984); Takeda et al., Nature 314:452-454 (1985)) by splicing genes from a mouse antibody molecule of appropriate antigen specificity together with genes from a human antibody molecule of appropriate biological activity can be used. As described supra, a chimeric antibody is a molecule in which different portions are derived from different animal species, such as those having a variable region derived from a murine mAb and a human immunoglobulin constant region, e.g., humanized antibodies.

[0388] Alternatively, techniques described for the production of single chain antibodies (U.S. Pat. No. 4,946,778; Bird, Science 242:423-42 (1988); Huston et al., Proc. Natl. Acad. Sci. USA 85:5879-5883 (1988); and Ward et al., Nature 334:544-54 (1989)) can be adapted to produce single chain antibodies. Single chain antibodies are formed by linking the heavy and light chain fragments of the Fv region via an amino acid bridge, resulting in a single chain polypeptide. Techniques for the assembly of functional Fv fragments in E. coli may also be used (Skerra et al., Science 242:1038-1041 (1988)).

Methods of Producing Antibodies

[0389] The antibodies of the invention can be produced by any method known in the art for the synthesis of antibodies, in particular, by chemical synthesis or preferably, by recombinant expression techniques.

[0390] Recombinant expression of an antibody of the invention, or fragment, derivative or analog thereof, (e.g., a heavy or light chain of an antibody of the invention or a single chain antibody of the invention), requires construction of an expression vector containing a polynucleotide that encodes the antibody. Once a polynucleotide encoding an antibody molecule or a heavy or light chain of an antibody, or portion thereof (preferably containing the heavy or light chain variable domain), of the invention has been obtained, the vector for the production of the antibody molecule may be produced by recombinant DNA technology using techniques well known in the art. Thus, methods for preparing a protein by expressing a polynucleotide containing an antibody encoding nucleotide sequence are described herein. Methods which are well known to those skilled in the art can be used to construct expression vectors containing antibody coding sequences and appropriate transcriptional and translational control signals. These methods include, for example, in vitro recombinant DNA techniques, synthetic techniques, and in vivo genetic recombination. The invention, thus, provides replicable vectors comprising a nucleotide sequence encoding an antibody molecule of the invention, or a heavy or light chain thereof, or a heavy or light chain variable domain, operably linked to a promoter. Such vectors may include the nucleotide sequence encoding the constant region of the antibody molecule (see, e.g., PCT Publication WO 86/05807; PCT Publication WO 89/01036; and U.S. Pat. No. 5,122,464) and the variable domain of the antibody may be cloned into such a vector for expression of the entire heavy or light chain.

[0391] The expression vector is transferred to a host cell by conventional techniques and the transfected cells are then cultured by conventional techniques to produce an antibody of the invention. Thus, the invention includes host cells containing a polynucleotide encoding an antibody of the invention, or a heavy or light chain thereof, or a single chain antibody of the invention, operably linked to a heterologous promoter. In preferred embodiments for the expression of double-chained antibodies, vectors encoding both the heavy and light chains may be co-expressed in the host cell for expression of the entire immunoglobulin molecule, as detailed below.

[0392] A variety of host-expression vector systems may be utilized to express the antibody molecules of the invention. Such host-expression systems represent vehicles by which the coding sequences of interest may be produced and subsequently purified, but also represent cells which may, when transformed or transfected with the appropriate nucleotide coding sequences, express an antibody molecule of the invention in situ. These include but are not limited to microorganisms such as bacteria (e.g., E. coli, B. subtilis) transformed with recombinant bacteriophage DNA, plasmid DNA or cosmid DNA expression vectors containing antibody coding sequences; yeast (e.g., Saccharomyces, Pichia) transformed with recombinant yeast expression vectors containing antibody coding sequences; insect cell systems infected with recombinant virus expression vectors (e.g., baculovirus) containing antibody coding sequences; plant cell systems infected with recombinant virus expression vectors (e.g., cauliflower mosaic virus, CaMV; tobacco mosaic virus, TMV) or transformed with recombinant plasmid expression vectors (e.g., Ti plasmid) containing antibody coding sequences; or mammalian cell systems (e.g., COS, CHO, BHK, 293, 3T3 cells) harboring recombinant expression constructs containing promoters derived from the genome of mammalian cells (e.g., metallothionein promoter) or from mammalian viruses (e.g., the adenovirus late promoter; the vaccinia virus 7.5K promoter). Preferably, bacterial cells such as Escherichia coli, and more preferably, eukaryotic cells, especially for the expression of whole recombinant antibody molecule, are used for the expression of a recombinant antibody molecule. For example, mammalian cells such as Chinese hamster ovary cells (CHO), in conjunction with a vector such as the major intermediate early gene promoter element from human cytomegalovirus is an effective expression system for antibodies (Foecking et al., Gene 45:101 (1986); Cockett et al., Bio/Technology 8:2 (1990)).

[0393] In bacterial systems, a number of expression vectors may be advantageously selected depending upon the use intended for the antibody molecule being expressed. For example, when a large quantity of such a protein is to be produced, for the generation of pharmaceutical compositions of an antibody molecule, vectors which direct the expression of high levels of fusion protein products that are readily purified may be desirable. Such vectors include, but are not limited, to the E. coli expression vector pUR278 (Ruther et al., EMBO J. 2:1791 (1983)), in which the antibody coding sequence may be ligated individually into the vector in frame with the lac Z coding region so that a fusion protein is produced; pIN vectors (Inouye & Inouye, Nucleic Acids Res. 13:3101-3109 (1985); Van Heeke & Schuster, J. Biol. Chem. 24:5503-5509 (1989)); and the like. pGEX vectors may also be used to express foreign polypeptides as fusion proteins with glutathione S-transferase (GST). In general, such fusion proteins are soluble and can easily be purified from lysed cells by adsorption and binding to matrix glutathione-agarose beads followed by elution in the presence of free glutathione. The pGEX vectors are designed to include thrombin or factor Xa protease cleavage sites so that the cloned target gene product can be released from the GST moiety.

[0394] In an insect system, Autographa californica nuclear polyhedrosis virus (AcNPV) is used as a vector to express foreign genes. The virus grows in Spodoptera frugiperda cells. The antibody coding sequence may be cloned individually into non-essential regions (for example the polyhedrin gene) of the virus and placed under control of an AcNPV promoter (for example the polyhedrin promoter).

[0395] In mammalian host cells, a number of viral-based expression systems may be utilized. In cases where an adenovirus is used as an expression vector, the antibody coding sequence of interest may be ligated to an adenovirus transcription/translation control complex, e.g., the late promoter and tripartite leader sequence. This chimeric gene may then be inserted in the adenovirus genome by in vitro or in vivo recombination. Insertion in a non-essential region of the viral genome (e.g., region E1 or E3) will result in a recombinant virus that is viable and capable of expressing the antibody molecule in infected hosts. (e.g., see Logan & Shenk, Proc. Natl. Acad. Sci. USA 81:355-359 (1984)). Specific initiation signals may also be required for efficient translation of inserted antibody coding sequences. These signals include the ATG initiation codon and adjacent sequences. Furthermore, the initiation codon must be in phase with the reading frame of the desired coding sequence to ensure translation of the entire insert. These exogenous translational control signals and initiation codons can be of a variety of origins, both natural and synthetic. The efficiency of expression may be enhanced by the inclusion of appropriate transcription enhancer elements, transcription terminators, etc. (see Bittner et al., Methods in Enzymol. 153:51-544 (1987)).

[0396] In addition, a host cell strain may be chosen which modulates the expression of the inserted sequences, or modifies and processes the gene product in the specific fashion desired. Such modifications (e.g., glycosylation) and processing (e.g., cleavage) of protein products may be important for the function of the protein. Different host cells have characteristic and specific mechanisms for the post-translational processing and modification of proteins and gene products. Appropriate cell lines or host systems can be chosen to ensure the correct modification and processing of the foreign protein expressed. To this end, eukaryotic host cells which possess the cellular machinery for proper processing of the primary transcript, glycosylation, and phosphorylation of the gene product may be used. Such mammalian host cells include but are not limited to CHO, VERY, BHK, Hela, COS, MDCK, 293, 3T3, W138, and in particular, breast cancer cell lines such as, for example, BT483, Hs578T, HTB2, BT20 and T47D, and normal mammary gland cell line such as, for example, CRL7030 and Hs578Bst.

[0397] For long-term, high-yield production of recombinant proteins, stable expression is preferred. For example, cell lines which stably express the antibody molecule may be engineered. Rather than using expression vectors which contain viral origins of replication, host cells can be transformed with DNA controlled by appropriate expression control elements (e.g., promoter, enhancer, sequences, transcription terminators, polyadenylation sites, etc.), and a selectable marker. Following the introduction of the foreign DNA, engineered cells may be allowed to grow for 1-2 days in an enriched media, and then are switched to a selective media. The selectable marker in the recombinant plasmid confers resistance to the selection and allows cells to stably integrate the plasmid into their chromosomes and grow to form foci which in turn can be cloned and expanded into cell lines. This method may advantageously be used to engineer cell lines which express the antibody molecule. Such engineered cell lines may be particularly useful in screening and evaluation of compounds that interact directly or indirectly with the antibody molecule.

[0398] A number of selection systems may be used, including but not limited to the herpes simplex virus thymidine kinase (Wigler et al., Cell 11:223 (1977)), hypoxanthine-guanine phosphoribosyltransferase (Szybalska & Szybalski, Proc. Natl. Acad. Sci. USA 48:202 (1992)), and adenine phosphoribosyltransferase (Lowy et al., Cell 22:817 (1980)) genes can be employed in tk−, hgprt− or aprt− cells, respectively. Also, antimetabolite resistance can be used as the basis of selection for the following genes: dhfr, which confers resistance to methotrexate (Wigler et al., Natl. Acad. Sci. USA 77:357 (1980); O'Hare et al., Proc. Natl. Acad. Sci. USA 78:1527 (1981)); gpt, which confers resistance to mycophenolic acid (Mulligan & Berg, Proc. Natl. Acad. Sci. USA 78:2072 (1981)); neo, which confers resistance to the aminoglycoside G-418 Clinical Pharmacy 12:488-505; Wu and Wu, Biotherapy 3:87-95 (1991); Tolstoshev, Ann. Rev. Pharmacol. Toxicol. 32:573-596 (1993); Mulligan, Science 260:926-932 (1993); and Morgan and Anderson, Ann. Rev. Biochem. 62:191-217 (1993); May, 1993, TIB TECH 11(5):155-215); and hygro, which confers resistance to hygromycin (Santerre et al., Gene 30:147 (1984)). Methods commonly known in the art of recombinant DNA technology may be routinely applied to select the desired recombinant clone, and such methods are described, for example, in Ausubel et al. (eds.), Current Protocols in Molecular Biology, John Wiley & Sons, NY (1993); Kriegler, Gene Transfer and Expression, A Laboratory Manual, Stockton Press, NY (1990); and in Chapters 12 and 13, Dracopoli et al. (eds), Current Protocols in Human Genetics, John Wiley & Sons, NY (1994); Colberre-Garapin et al., J. Mol. Biol. 150:1 (1981), which are incorporated by reference herein in their entireties.

[0399] The expression levels of an antibody molecule can be increased by vector amplification (for a review, see Bebbington and Hentschel, The use of vectors based on gene amplification for the expression of cloned genes in mammalian cells in DNA cloning, Vol. 3. (Academic Press, New York, 1987)). When a marker in the vector system expressing antibody is amplifiable, increase in the level of inhibitor present in culture of host cell will increase the number of copies of the marker gene. Since the amplified region is associated with the antibody gene, production of the antibody will also increase (Crouse et al., Mol. Cell. Biol. 3:257 (1983)).

[0400] The host cell may be co-transfected with two expression vectors of the invention, the first vector encoding a heavy chain derived polypeptide and the second vector encoding a light chain derived polypeptide. The two vectors may contain identical selectable markers which enable equal expression of heavy and light chain polypeptides. Alternatively, a single vector may be used which encodes, and is capable of expressing, both heavy and light chain polypeptides. In such situations, the light chain should be placed before the heavy chain to avoid an excess of toxic free heavy chain (Proudfoot, Nature 322:52 (1986); Köhler, Proc. Natl. Acad. Sci. USA 77:2197 (1980)). The coding sequences for the heavy and light chains may comprise cDNA or genomic DNA.

[0401] Once an antibody molecule of the invention has been produced by an animal, chemically synthesized, or recombinantly expressed, it may be purified by any method known in the art for purification of an immunoglobulin molecule, for example, by chromatography (e.g., ion exchange, affinity, particularly by affinity for the specific antigen after Protein A, and sizing column chromatography), centrifugation, differential solubility, or by any other standard technique for the purification of proteins. In addition, the antibodies of the present invention or fragments thereof can be fused to heterologous polypeptide sequences described herein or otherwise known in the art, to facilitate purification.

[0402] The present invention encompasses antibodies recombinantly fused or chemically conjugated (including both covalently and non-covalently conjugations) to a polypeptide (or portion thereof, preferably at least 10, 20, 30, 40, 50, 60, 70, 80, 90 or 100 amino acids of the polypeptide) of the present invention to generate fusion proteins. The fusion does not necessarily need to be direct, but may occur through linker sequences. The antibodies may be specific for antigens other than polypeptides (or portion thereof, preferably at least 10, 20, 30, 40, 50, 60, 70, 80, 90 or 100 amino acids of the polypeptide) of the present invention. For example, antibodies may be used to target the polypeptides of the present invention to particular cell types, either in vitro or in vivo, by fusing or conjugating the polypeptides of the present invention to antibodies specific for particular cell surface receptors. Antibodies fused or conjugated to the polypeptides of the present invention may also be used in in vitro immunoassays and purification methods using methods known in the art. See e.g., Harbor et al., supra, and PCT publication WO 93/21232; EP 439,095; Naramura et al., Immunol. Lett. 39:91-99 (1994); U.S. Pat. No. 5,474,981; Gillies et al., PNAS 89:1428-1432 (1992); Fell et al., J. Immunol. 146:2446-2452(1991), which are incorporated by reference in their entireties.

[0403] The present invention further includes compositions comprising the polypeptides of the present invention fused or conjugated to antibody domains other than the variable regions. For example, the polypeptides of the present invention may be fused or conjugated to an antibody Fc region, or portion thereof. The antibody portion fused to a polypeptide of the present invention may comprise the constant region, hinge region, CH1 domain, CH2 domain, and CH3 domain or any combination of whole domains or portions thereof. The polypeptides may also be fused or conjugated to the above antibody portions to form multimers. For example, Fc portions fused to the polypeptides of the present invention can form dimers through disulfide bonding between the Fc portions. Higher multimeric forms can be made by fusing the polypeptides to portions of IgA and IgM. Methods for fusing or conjugating the polypeptides of the present invention to antibody portions are known in the art. See, e.g., U.S. Pat. Nos. 5,336,603; 5,622,929; 5,359,046; 5,349,053; 5,447,851; 5,112,946; EP 307,434; EP 367,166; PCT publications WO 96/04388; WO 91/06570; Ashkenazi et al., Proc. Natl. Acad. Sci. USA 88:10535-10539 (1991); Zheng et al., J. Immunol. 154:5590-5600 (1995); and Vil et al., Proc. Natl. Acad. Sci. USA 89:11337-11341 (1992) (said references incorporated by reference in their entireties).

[0404] As discussed, supra, the polypeptides corresponding to a polypeptide, polypeptide fragment, or a variant of SEQ ID NO:Y may be fused or conjugated to the above antibody portions to increase the in vivo half life of the polypeptides or for use in immunoassays using methods known in the art. Further, the polypeptides corresponding to SEQ ID NO:Y may be fused or conjugated to the above antibody portions to facilitate purification. One reported example describes chimeric proteins consisting of the first two domains of the human CD4-polypeptide and various domains of the constant regions of the heavy or light chains of mammalian immunoglobulins. (EP 394,827; Traunecker et al., Nature 331:84-86 (1988). The polypeptides of the present invention fused or conjugated to an antibody having disulfide-linked dimeric structures (due to the IgG) may also be more efficient in binding and neutralizing other molecules, than the monomeric secreted protein or protein fragment alone. (Fountoulakis et al., J. Biochem. 270:3958-3964 (1995)). In many cases, the Fc part in a fusion protein is beneficial in therapy and diagnosis, and thus can result in, for example, improved pharmacokinetic properties. (EP A 232,262). Alternatively, deleting the Fc part after the fusion protein has been expressed, detected, and purified, would be desired. For example, the Fc portion may hinder therapy and diagnosis if the fusion protein is used as an antigen for immunizations. In drug discovery, for example, human proteins, such as hIL-5, have been fused with Fc portions for the purpose of high-throughput screening assays to identify antagonists of hIL-5. (See, Bennett et al., J. Molecular Recognition 8:52-58 (1995); Johanson et al., J. Biol. Chem. 270:9459-9471 (1995).

[0405] Moreover, the antibodies or fragments thereof of the present invention can be fused to marker sequences, such as a peptide to facilitate purification. In preferred embodiments, the marker amino acid sequence is a hexa-histidine peptide, such as the tag provided in a pQE vector (QIAGEN, Inc., 9259 Eton Avenue, Chatsworth, Calif., 91311), among others, many of which are commercially available. As described in Gentz et al., Proc. Natl. Acad. Sci. USA 86:821-824 (1989), for instance, hexa-histidine provides for convenient purification of the fusion protein. Other peptide tags useful for purification include, but are not limited to, the “HA” tag, which corresponds to an epitope derived from the influenza hemagglutinin protein (Wilson et al., Cell 37:767 (1984)) and the “flag” tag.

[0406] The present invention further encompasses antibodies or fragments thereof conjugated to a diagnostic or therapeutic agent. The antibodies can be used diagnostically to, for example, monitor the development or progression of a tumor as part of a clinical testing procedure to, e.g., determine the efficacy of a given treatment regimen. Detection can be facilitated by coupling the antibody to a detectable substance. Examples of detectable substances include various enzymes, prosthetic groups, fluorescent materials, luminescent materials, bioluminescent materials, radioactive materials, positron emitting metals using various positron emission tomographies, and nonradioactive paramagnetic metal ions. The detectable substance may be coupled or conjugated either directly to the antibody (or fragment thereof) or indirectly, through an intermediate (such as, for example, a linker known in the art) using techniques known in the art. See, for example, U.S. Pat. No. 4,741,900 for metal ions which can be conjugated to antibodies for use as diagnostics according to the present invention. Examples of suitable enzymes include horseradish peroxidase, alkaline phosphatase, beta-galactosidase, or acetylcholinesterase; examples of suitable prosthetic group complexes include streptavidin/biotin and avidin/biotin; examples of suitable fluorescent materials include umbelliferone, fluorescein, fluorescein isothiocyanate, rhodamine, dichlorotriazinylamine fluorescein, dansyl chloride or phycoerythrin; an example of a luminescent material includes luminol; examples of bioluminescent materials include luciferase, luciferin, and aequorin; and examples of suitable radioactive material include 125I, 131I, 111In or 99Tc.

[0407] Further, an antibody or fragment thereof may be conjugated to a therapeutic moiety such as a cytotoxin, e.g., a cytostatic or cytocidal agent, a therapeutic agent or a radioactive metal ion, e.g., alpha-emitters such as, for example, 213Bi. A cytotoxin or cytotoxic agent includes any agent that is detrimental to cells. Examples include paclitaxol, cytochalasin B, gramicidin D, ethidium bromide, emetine, mitomycin, etoposide, tenoposide, vincristine, vinblastine, colchicin, doxorubicin, daunorubicin, dihydroxy anthracin dione, mitoxantrone, mithramycin, actinomycin D, 1-dehydrotestosterone, glucocorticoids, procaine, tetracaine, lidocaine, propranolol, and puromycin and analogs or homologs thereof. Therapeutic agents include, but are not limited to, antimetabolites (e.g., methotrexate, 6-mercaptopurine, 6-thioguanine, cytarabine, 5-fluorouracil decarbazine), alkylating agents (e.g., mechlorethamine, thioepa chlorambucil, melphalan, carmustine (BSNU) and lomustine (CCNU), cyclothosphamide, busulfan, dibromomannitol, streptozotocin, mitomycin C, and cis-dichlorodiamine platinum (II) (DDP) cisplatin), anthracyclines (e.g., daunorubicin (formerly daunomycin) and doxorubicin), antibiotics (e.g., dactinomycin (formerly actinomycin), bleomycin, mithramycin, and anthramycin (AMC)), and anti-mitotic agents (e.g., vincristine and vinblastine).

[0408] The conjugates of the invention can be used for modifying a given biological response, the therapeutic agent or drug moiety is not to be construed as limited to classical chemical therapeutic agents. For example, the drug moiety may be a protein or polypeptide possessing a desired biological activity. Such proteins may include, for example, a toxin such as abrin, ricin A, pseudomonas exotoxin, or diphtheria toxin; a protein such as tumor necrosis factor, a-interferon, β-interferon, nerve growth factor, platelet derived growth factor, tissue plasminogen activator, an apoptotic agent, e.g., TNF-alpha, TNF-beta, AIM I (See, International Publication No. WO 97/33899), AIM II (See, International Publication No. WO 97/34911), Fas Ligand (Takahashi et al., Int. Immunol., 6:1567-1574 (1994)), VEGI (See, International Publication No. WO 99/23105), a thrombotic agent or an anti-angiogenic agent, e.g., angiostatin or endostatin; or, biological response modifiers such as, for example, lymphokines, interleukin-1 (“IL-1”), interleukin-2 (“IL-2”), interleukin-6 (“IL-6”), granulocyte macrophage colony stimulating factor (“GM-CSF”), granulocyte colony stimulating factor (“G-CSF”), or other growth factors.

[0409] Antibodies may also be attached to solid supports, which are particularly useful for immunoassays or purification of the target antigen. Such solid supports include, but are not limited to, glass, cellulose, polyacrylamide, nylon, polystyrene, polyvinyl chloride or polypropylene.

[0410] Techniques for conjugating such therapeutic moiety to antibodies are well known, see, e.g., Arnon et al., “Monoclonal Antibodies For Immunotargeting Of Drugs In Cancer Therapy”, in Monoclonal Antibodies And Cancer Therapy, Reisfeld et al. (eds.), pp. 243-56 (Alan R. Liss, Inc. 1985); Hellstrom et al., “Antibodies For Drug Delivery”, in Controlled Drug Delivery (2nd Ed.), Robinson et al. (eds.), pp. 623-53 (Marcel Dekker, Inc. 1987); Thorpe, “Antibody Carriers Of Cytotoxic Agents In Cancer Therapy: A Review”, in Monoclonal Antibodies '84: Biological And Clinical Applications, Pinchera et al. (eds.), pp. 475-506 (1985); “Analysis, Results, And Future Prospective Of The Therapeutic Use Of Radiolabeled Antibody In Cancer Therapy”, in Monoclonal Antibodies For Cancer Detection And Therapy, Baldwin et al. (eds.), pp. 303-16 (Academic Press 1985), and Thorpe et al., “The Preparation And Cytotoxic Properties Of Antibody-Toxin Conjugates”, Immunol. Rev. 62:119-58 (1982).

[0411] Alternatively, an antibody can be conjugated to a second antibody to form an antibody heteroconjugate as described by Segal in U.S. Pat. No. 4,676,980, which is incorporated herein by reference in its entirety.

[0412] An antibody, with or without a therapeutic moiety conjugated to it, administered alone or in combination with cytotoxic factor(s) and/or cytokine(s) can be used as a therapeutic.

Immunophenotyping

[0413] The antibodies of the invention may be utilized for immunophenotyping of cell lines and biological samples. The translation product of the gene of the present invention may be useful as a cell specific marker, or more specifically as a cellular marker that is differentially expressed at various stages of differentiation and/or maturation of particular cell types. Monoclonal antibodies directed against a specific epitope, or combination of epitopes, will allow for the screening of cellular populations expressing the marker. Various techniques can be utilized using monoclonal antibodies to screen for cellular populations expressing the marker(s), and include magnetic separation using antibody-coated magnetic beads, “panning” with antibody attached to a solid matrix (i.e., plate), and flow cytometry (See, e.g., U.S. Pat. No. 5,985,660; and Morrison et al., Cell, 96:737-49 (1999)).

[0414] These techniques allow for the screening of particular populations of cells, such as might be found with hematological malignancies (i.e. minimal residual disease (MRD) in acute leukemic patients) and “non-self” cells in transplantations to prevent Graft-versus-Host Disease (GVHD). Alternatively, these techniques allow for the screening of hematopoietic stem and progenitor cells capable of undergoing proliferation and/or differentiation, as might be found in human umbilical cord blood.

Assays for Antibody Binding

[0415] The antibodies of the invention may be assayed for immunospecific binding by any method known in the art. The immunoassays which can be used include but are not limited to competitive and non-competitive assay systems using techniques such as western blots, radioimmunoassays, ELISA (enzyme linked immunosorbent assay), “sandwich” immunoassays, immunoprecipitation assays, precipitin reactions, gel diffusion precipitin reactions, immunodiffusion assays, agglutination assays, complement-fixation assays, immunoradiometric assays, fluorescent immunoassays, protein A immunoassays, to name but a few. Such assays are routine and well known in the art (see, e.g., Ausubel et al, eds, 1994, Current Protocols in Molecular Biology, Vol. 1, John Wiley & Sons, Inc., New York, which is incorporated by reference herein in its entirety). Exemplary immunoassays are described briefly below (but are not intended by way of limitation).

[0416] Immunoprecipitation protocols generally comprise lysing a population of cells in a lysis buffer such as RIPA buffer (1% NP-40 or Triton X-100, 1% sodium deoxycholate, 0.1% SDS, 0.15 M NaCl, 0.01 M sodium phosphate at pH 7.2, 1% Trasylol) supplemented with protein phosphatase and/or protease inhibitors (e.g., EDTA, PMSF, aprotinin, sodium vanadate), adding the antibody of interest to the cell lysate, incubating for a period of time (e.g., 1-4 hours) at 40 C, adding protein A and/or protein G sepharose beads to the cell lysate, incubating for about an hour or more at 4° C., washing the beads in lysis buffer and resuspending the beads in SDS/sample buffer. The ability of the antibody of interest to immunoprecipitate a particular antigen can be assessed by, e.g., western blot analysis. One of skill in the art would be knowledgeable as to the parameters that can be modified to increase the binding of the antibody to an antigen and decrease the background (e.g., pre-clearing the cell lysate with sepharose beads). For further discussion regarding immunoprecipitation protocols see, e.g., Ausubel et al, eds, 1994, Current Protocols in Molecular Biology, Vol. 1, John Wiley & Sons, Inc., New York at 10.16.1.

[0417] Western blot analysis generally comprises preparing protein samples, electrophoresis of the protein samples in a polyacrylamide gel (e.g., 8%-20% SDS-PAGE depending on the molecular weight of the antigen), transferring the protein sample from the polyacrylamide gel to a membrane such as nitrocellulose, PVDF or nylon, blocking the membrane in blocking solution (e.g., PBS with 3% BSA or non-fat milk), washing the membrane in washing buffer (e.g., PBS-Tween 20), blocking the membrane with primary antibody (the antibody of interest) diluted in blocking buffer, washing the membrane in washing buffer, blocking the membrane with a secondary antibody (which recognizes the primary antibody, e.g., an anti-human antibody) conjugated to an enzymatic substrate (e.g., horseradish peroxidase or alkaline phosphatase) or radioactive molecule (e.g., 32P or 125I) diluted in blocking buffer, washing the membrane in wash buffer, and detecting the presence of the antigen. One of skill in the art would be knowledgeable as to the parameters that can be modified to increase the signal detected and to reduce the background noise. For further discussion regarding western blot protocols see, e.g., Ausubel et al, eds, 1994, Current Protocols in Molecular Biology, Vol. 1, John Wiley & Sons, Inc., New York at 10.8.1.

[0418] ELISAs comprise preparing antigen, coating the well of a 96 well microtiter plate with the antigen, adding the antibody of interest conjugated to a detectable compound such as an enzymatic substrate (e.g., horseradish peroxidase or alkaline phosphatase) to the well and incubating for a period of time, and detecting the presence of the antigen. In ELISAs the antibody of interest does not have to be conjugated to a detectable compound; instead, a second antibody (which recognizes the antibody of interest) conjugated to a detectable compound may be added to the well. Further, instead of coating the well with the antigen, the antibody may be coated to the well. In this case, a second antibody conjugated to a detectable compound may be added following the addition of the antigen of interest to the coated well. One of skill in the art would be knowledgeable as to the parameters that can be modified to increase the signal detected as well as other variations of ELISAs known in the art. For further discussion regarding ELISAs see, e.g., Ausubel et al, eds, 1994, Current Protocols in Molecular Biology, Vol. 1, John Wiley & Sons, Inc., New York at 11.2.1.

[0419] The binding affinity of an antibody to an antigen and the off-rate of an antibody-antigen interaction can be determined by competitive binding assays. One example of a competitive binding assay is a radioimmunoassay comprising the incubation of labeled antigen (e.g., 3H or 125I) with the antibody of interest in the presence of increasing amounts of unlabeled antigen, and the detection of the antibody bound to the labeled antigen. The affinity of the antibody of interest for a particular antigen and the binding off-rates can be determined from the data by scatchard plot analysis. Competition with a second antibody can also be determined using radioimmunoassays. In this case, the antigen is incubated with antibody of interest conjugated to a labeled compound (e.g., 3H or 125I) in the presence of increasing amounts of an unlabeled second antibody.

Therapeutic Uses

[0420] The present invention is further directed to antibody-based therapies which involve administering antibodies of the invention to an animal, preferably a mammal, and most preferably a human, patient for treating one or more of the disclosed diseases, disorders, or conditions. Therapeutic compounds of the invention include, but are not limited to, antibodies of the invention (including fragments, analogs and derivatives thereof as described herein) and nucleic acids encoding antibodies of the invention (including fragments, analogs and derivatives thereof and anti-idiotypic antibodies as described herein). The antibodies of the invention can be used to treat, inhibit or prevent diseases, disorders or conditions associated with aberrant expression and/or activity of a polypeptide of the invention, including, but not limited to, any one or more of the diseases, disorders, or conditions described herein. The treatment and/or prevention of diseases, disorders, or conditions associated with aberrant expression and/or activity of a polypeptide of the invention includes, but is not limited to, alleviating symptoms associated with those diseases, disorders or conditions. Antibodies of the invention may be provided in pharmaceutically acceptable compositions as known in the art or as described herein.

[0421] A summary of the ways in which the antibodies of the present invention may be used therapeutically includes binding polynucleotides or polypeptides of the present invention locally or systemically in the body or by direct cytotoxicity of the antibody, e.g. as mediated by complement (CDC) or by effector cells (ADCC). Some of these approaches are described in more detail below. Armed with the teachings provided herein, one of ordinary skill in the art will know how to use the antibodies of the present invention for diagnostic, monitoring or therapeutic purposes without undue experimentation.

[0422] The antibodies of this invention may be advantageously utilized in combination with other monoclonal or chimeric antibodies, or with lymphokines or hematopoietic growth factors (such as, e.g., IL-2, IL-3 and IL-7), for example, which serve to increase the number or activity of effector cells which interact with the antibodies.

[0423] The antibodies of the invention may be administered alone or in combination with other types of treatments (e.g., radiation therapy, chemotherapy, hormonal therapy, immunotherapy and anti-tumor agents). Generally, administration of products of a species origin or species reactivity (in the case of antibodies) that is the same species as that of the patient is preferred. Thus, in a preferred embodiment, human antibodies, fragments derivatives, analogs, or nucleic acids, are administered to a human patient for therapy or prophylaxis.

[0424] It is preferred to use high affinity and/or potent in vivo inhibiting and/or neutralizing antibodies against polypeptides or polynucleotides of the present invention, fragments or regions thereof, for both immunoassays directed to and therapy of disorders related to polynucleotides or polypeptides, including fragments thereof, of the present invention. Such antibodies, fragments, or regions, will preferably have an affinity for polynucleotides or polypeptides of the invention, including fragments thereof. Preferred binding affinities include those with a dissociation constant or Kd less than 5×10⁻² M, 10⁻² M, 5×10⁻³ M, 10⁻³ M, 5×10⁻⁴ M, 10⁻⁴ M, 5×10⁻⁵ M, 10⁻⁻⁵ M, 5×10⁻⁶ M, 10⁻⁶ M, 5×10⁻⁷ M, 10⁻⁷ M, 5×10⁻⁸ M, 10⁻⁸ M, 5×10⁻⁹ M, 10⁻⁹ M, 5×10⁻¹⁰ M, 10⁻¹⁰ M, 5×10⁻¹¹ M, 10⁻¹¹ M, 5×10⁻¹² M, 10⁻¹² M, 5×10⁻¹³ M, 10⁻¹³ M, 5×10⁻¹⁴ M, 10⁻¹⁴ M, 5×10⁻¹⁵ M, and 10⁻¹⁵ M.

Gene Therapy

[0425] In a specific embodiment, nucleic acids comprising sequences encoding antibodies or functional derivatives thereof, are administered to treat, inhibit or prevent a disease or disorder associated with aberrant expression and/or activity of a polypeptide of the invention, by way of gene therapy. Gene therapy refers to therapy performed by the administration to a subject of an expressed or expressible nucleic acid. In this embodiment of the invention, the nucleic acids produce their encoded protein that mediates a therapeutic effect.

[0426] Any of the methods for gene therapy available in the art can be used according to the present invention. Exemplary methods are described below.

[0427] For general reviews of the methods of gene therapy, see Goldspiel et al., Clinical Pharmacy 12:488-505 (1993); Wu and Wu, Biotherapy 3:87-95 (1991); Tolstoshev, Ann. Rev. Pharmacol. Toxicol. 32:573-596 (1993); Mulligan, Science 260:926-932 (1993); and Morgan and Anderson, Ann. Rev. Biochem. 62:191-217 (1993); May, TIBTECH 11(5):155-215 (1993). Methods commonly known in the art of recombinant DNA technology which can be used are described in Ausubel et al. (eds.), Current Protocols in Molecular Biology, John Wiley & Sons, NY (1993); and Kriegler, Gene Transfer and Expression, A Laboratory Manual, Stockton Press, NY (1990).

[0428] In a preferred aspect, the compound comprises nucleic acid sequences encoding an antibody, said nucleic acid sequences being part of expression vectors that express the antibody or fragments or chimeric proteins or heavy or light chains thereof in a suitable host. In particular, such nucleic acid sequences have promoters operably linked to the antibody coding region, said promoter being inducible or constitutive, and, optionally, tissue-specific. In another particular embodiment, nucleic acid molecules are used in which the antibody coding sequences and any other desired sequences are flanked by regions that promote homologous recombination at a desired site in the genome, thus providing for intrachromosomal expression of the antibody encoding nucleic acids (Koller and Smithies, Proc. Natl. Acad. Sci. USA 86:8932-8935 (1989); Zijlstra et al., Nature 342:435-438 (1989). In specific embodiments, the expressed antibody molecule is a single chain antibody; alternatively, the nucleic acid sequences include sequences encoding both the heavy and light chains, or fragments thereof, of the antibody.

[0429] Delivery of the nucleic acids into a patient may be either direct, in which case the patient is directly exposed to the nucleic acid or nucleic acid-carrying vectors, or indirect, in which case, cells are first transformed with the nucleic acids in vitro, then transplanted into the patient. These two approaches are known, respectively, as in vivo or ex vivo gene therapy.

[0430] In a specific embodiment, the nucleic acid sequences are directly administered in vivo, where it is expressed to produce the encoded product. This can be accomplished by any of numerous methods known in the art, e.g., by constructing them as part of an appropriate nucleic acid expression vector and administering it so that they become intracellular, e.g., by infection using defective or attenuated retrovirals or other viral vectors (see U.S. Pat. No. 4,980,286), or by direct injection of naked DNA, or by use of microparticle bombardment (e.g., a gene gun; Biolistic, Dupont), or coating with lipids or cell-surface receptors or transfecting agents, encapsulation in liposomes, microparticles, or microcapsules, or by administering them in linkage to a peptide which is known to enter the nucleus, by administering it in linkage to a ligand subject to receptor-mediated endocytosis (see, e.g., Wu and Wu, J. Biol. Chem. 262:4429-4432 (1987)) (which can be used to target cell types specifically expressing the receptors), etc. In another embodiment, nucleic acid-ligand complexes can be formed in which the ligand comprises a fusogenic viral peptide to disrupt endosomes, allowing the nucleic acid to avoid lysosomal degradation. In yet another embodiment, the nucleic acid can be targeted in vivo for cell specific uptake and expression, by targeting a specific receptor (see, e.g., PCT Publications WO 92/06180; WO 92/22635; WO92/20316; WO93/14188, WO 93/20221). Alternatively, the nucleic acid can be introduced intracellularly and incorporated within host cell DNA for expression, by homologous recombination (Koller and Smithies, Proc. Natl. Acad. Sci. USA 86:8932-8935 (1989); Zijlstra et al., Nature 342:435-438 (1989)).

[0431] In a specific embodiment, viral vectors that contains nucleic acid sequences encoding an antibody of the invention are used. For example, a retroviral vector can be used (see Miller et al., Meth. Enzymol. 217:581-599 (1993)). These retroviral vectors contain the components necessary for the correct packaging of the viral genome and integration into the host cell DNA. The nucleic acid sequences encoding the antibody to be used in gene therapy are cloned into one or more vectors, which facilitates delivery of the gene into a patient. More detail about retroviral vectors can be found in Boesen et al., Biotherapy 6:291-302 (1994), which describes the use of a retroviral vector to deliver the mdr1 gene to hematopoietic stem cells in order to make the stem cells more resistant to chemotherapy. Other references illustrating the use of retroviral vectors in gene therapy are: Clowes et al., J. Clin. Invest. 93:644-651 (1994); Kiem et al., Blood 83:1467-1473 (1994); Salmons and Gunzberg, Human Gene Therapy 4:129-141 (1993); and Grossman and Wilson, Curr. Opin. in Genetics and Devel. 3:110-114 (1993).

[0432] Adenoviruses are other viral vectors that can be used in gene therapy. Adenoviruses are especially attractive vehicles for delivering genes to respiratory epithelia. Adenoviruses naturally infect respiratory epithelia where they cause a mild disease. Other targets for adenovirus-based delivery systems are liver, the central nervous system, endothelial cells, and muscle. Adenoviruses have the advantage of being capable of infecting non-dividing cells. Kozarsky and Wilson, Current Opinion in Genetics and Development 3:499-503 (1993) present a review of adenovirus-based gene therapy. Bout et al., Human Gene Therapy 5:3-10 (1994) demonstrated the use of adenovirus vectors to transfer genes to the respiratory epithelia of rhesus monkeys. Other instances of the use of adenoviruses in gene therapy can be found in Rosenfeld et al., Science 252:431-434 (1991); Rosenfeld et al., Cell 68:143-155 (1992); Mastrangeli et al., J. Clin. Invest. 91:225-234 (1993); PCT Publication WO94/12649; and Wang, et al., Gene Therapy 2:775-783 (1995). In a preferred embodiment, adenovirus vectors are used.

[0433] Adeno-associated virus (AAV) has also been proposed for use in gene therapy (Walsh et al., Proc. Soc. Exp. Biol. Med. 204:289-300 (1993); U.S. Pat. No. 5,436,146).

[0434] Another approach to gene therapy involves transferring a gene to cells in tissue culture by such methods as electroporation, lipofection, calcium phosphate mediated transfection, or viral infection. Usually, the method of transfer includes the transfer of a selectable marker to the cells. The cells are then placed under selection to isolate those cells that have taken up and are expressing the transferred gene. Those cells are then delivered to a patient.

[0435] In this embodiment, the nucleic acid is introduced into a cell prior to administration in vivo of the resulting recombinant cell. Such introduction can be carried out by any method known in the art, including but not limited to transfection, electroporation, microinjection, infection with a viral or bacteriophage vector containing the nucleic acid sequences, cell fusion, chromosome-mediated gene transfer, microcell-mediated gene transfer, spheroplast fusion, etc. Numerous techniques are known in the art for the introduction of foreign genes into cells (see, e.g., Loeffler and Behr, Meth. Enzymol. 217:599-618 (1993); Cohen et al., Meth. Enzymol. 217:618-644 (1993); Cline, Pharmac. Ther. 29:69-92m (1985) and may be used in accordance with the present invention, provided that the necessary developmental and physiological functions of the recipient cells are not disrupted. The technique should provide for the stable transfer of the nucleic acid to the cell, so that the nucleic acid is expressible by the cell and preferably heritable and expressible by its cell progeny.

[0436] The resulting recombinant cells can be delivered to a patient by various methods known in the art. Recombinant blood cells (e.g., hematopoietic stem or progenitor cells) are preferably administered intravenously. The amount of cells envisioned for use depends on the desired effect, patient state, etc., and can be determined by one skilled in the art.

[0437] Cells into which a nucleic acid can be introduced for purposes of gene therapy encompass any desired, available cell type, and include but are not limited to epithelial cells, endothelial cells, keratinocytes, fibroblasts, muscle cells, hepatocytes; blood cells such as Tlymphocytes, Blymphocytes, monocytes, macrophages, neutrophils, eosinophils, megakaryocytes, granulocytes; various stem or progenitor cells, in particular hematopoietic stem or progenitor cells, e.g., as obtained from bone marrow, umbilical cord blood, peripheral blood, fetal liver, etc.

[0438] In a preferred embodiment, the cell used for gene therapy is autologous to the patient.

[0439] In an embodiment in which recombinant cells are used in gene therapy, nucleic acid sequences encoding an antibody are introduced into the cells such that they are expressible by the cells or their progeny, and the recombinant cells are then administered in vivo for therapeutic effect. In a specific embodiment, stem or progenitor cells are used. Any stem and/or progenitor cells which can be isolated and maintained in vitro can potentially be used in accordance with this embodiment of the present invention (see e.g. PCT Publication WO 94/08598; Stemple and Anderson, Cell 71:973-985 (1992); Rheinwald, Meth. Cell Bio. 21A:229 (1980); and Pittelkow and Scott, Mayo Clinic Proc. 61:771 (1986)).

[0440] In a specific embodiment, the nucleic acid to be introduced for purposes of gene therapy comprises an inducible promoter operably linked to the coding region, such that expression of the nucleic acid is controllable by controlling the presence or absence of the appropriate inducer of transcription.

Demonstration of Therapeutic or Prophylactic Activity

[0441] The compounds or pharmaceutical compositions of the invention are preferably tested in vitro, and then in vivo for the desired therapeutic or prophylactic activity, prior to use in humans. For example, in vitro assays to demonstrate the therapeutic or prophylactic utility of a compound or pharmaceutical composition include, the effect of a compound on a cell line or a patient tissue sample. The effect of the compound or composition on the cell line and/or tissue sample can be determined utilizing techniques known to those of skill in the art including, but not limited to, rosette formation assays and cell lysis assays. In accordance with the invention, in vitro assays which can be used to determine whether administration of a specific compound is indicated, include in vitro cell culture assays in which a patient tissue sample is grown in culture, and exposed to or otherwise administered a compound, and the effect of such compound upon the tissue sample is observed.

Therapeutic/Prophylactic Administration and Composition

[0442] The invention provides methods of treatment, inhibition and prophylaxis by administration to a subject of an effective amount of a compound or pharmaceutical composition of the invention, preferably an antibody of the invention. In a preferred aspect, the compound is substantially purified (e.g., substantially free from substances that limit its effect or produce undesired side-effects). The subject is preferably an animal, including but not limited to animals such as cows, pigs, horses, chickens, cats, dogs, etc., and is preferably a mammal, and most preferably human.

[0443] Formulations and methods of administration that can be employed when the compound comprises a nucleic acid or an immunoglobulin are described above; additional appropriate formulations and routes of administration can be selected from among those described herein below.

[0444] Various delivery systems are known and can be used to administer a compound of the invention, e.g., encapsulation in liposomes, microparticles, microcapsules, recombinant cells capable of expressing the compound, receptor-mediated endocytosis (see, e.g., Wu and Wu, J. Biol. Chem. 262:4429-4432 (1987)), construction of a nucleic acid as part of a retroviral or other vector, etc. Methods of introduction include but are not limited to intradermal, intramuscular, intraperitoneal, intravenous, subcutaneous, intranasal, epidural, and oral routes. The compounds or compositions may be administered by any convenient route, for example by infusion or bolus injection, by absorption through epithelial or mucocutaneous linings (e.g., oral mucosa, rectal and intestinal mucosa, etc.) and may be administered together with other biologically active agents. Administration can be systemic or local. In addition, it may be desirable to introduce the pharmaceutical compounds or compositions of the invention into the central nervous system by any suitable route, including intraventricular and intrathecal injection; intraventricular injection may be facilitated by an intraventricular catheter, for example, attached to a reservoir, such as an Ommaya reservoir. Pulmonary administration can also be employed, e.g., by use of an inhaler or nebulizer, and formulation with an aerosolizing agent.

[0445] In a specific embodiment, it may be desirable to administer the pharmaceutical compounds or compositions of the invention locally to the area in need of treatment; this may be achieved by, for example, and not by way of limitation, local infusion during surgery, topical application, e.g., in conjunction with a wound dressing after surgery, by injection, by means of a catheter, by means of a suppository, or by means of an implant, said implant being of a porous, non-porous, or gelatinous material, including membranes, such as sialastic membranes, or fibers. Preferably, when administering a protein, including an antibody, of the invention, care must be taken to use materials to which the protein does not absorb.

[0446] In another embodiment, the compound or composition can be delivered in a vesicle, in particular a liposome (see Langer, Science 249:1527-1533 (1990); Treat et al., in Liposomes in the Therapy of Infectious Disease and Cancer, Lopez-Berestein and Fidler (eds.), Liss, New York, pp. 353-365 (1989); Lopez-Berestein, ibid., pp. 317-327; see generally ibid.)

[0447] In yet another embodiment, the compound or composition can be delivered in a controlled release system. In one embodiment, a pump may be used (see Langer, supra; Sefton, CRC Crit. Ref. Biomed. Eng. 14:201 (1987); Buchwald et al., Surgery 88:507 (1980); Saudek et al., N. Engl. J. Med. 321:574 (1989)). In another embodiment, polymeric materials can be used (see Medical Applications of Controlled Release, Langer and Wise (eds.), CRC Pres., Boca Raton, Fla. (1974); Controlled Drug Bioavailability, Drug Product Design and Performance, Smolen and Ball (eds.), Wiley, New York (1984); Ranger and Peppas, J., Macromol. Sci. Rev. Macromol. Chem. 23:61 (1983); see also Levy et al., Science 228:190 (1985); During et al., Ann. Neurol. 25:351 (1989); Howard et al., J. Neurosurg. 71:105 (1989)). In yet another embodiment, a controlled release system can be placed in proximity of the therapeutic target, i.e., the brain, thus requiring only a fraction of the systemic dose (see, e.g., Goodson, in Medical Applications of Controlled Release, supra, vol. 2, pp. 115-138 (1984)).

[0448] Other controlled release systems are discussed in the review by Langer (Science 249:1527-1533 (1990)).

[0449] In a specific embodiment where the compound of the invention is a nucleic acid encoding a protein, the nucleic acid can be administered in vivo to promote expression of its encoded protein, by constructing it as part of an appropriate nucleic acid expression vector and administering it so that it becomes intracellular, e.g., by use of a retroviral vector (see U.S. Pat. No. 4,980,286), or by direct injection, or by use of microparticle bombardment (e.g., a gene gun; Biolistic, Dupont), or coating with lipids or cell-surface receptors or transfecting agents, or by administering it in linkage to a homeobox-like peptide which is known to enter the nucleus (see e.g., Joliot et al., Proc. Natl. Acad. Sci. USA 88:1864-1868 (1991)), etc. Alternatively, a nucleic acid can be introduced intracellularly and incorporated within host cell DNA for expression, by homologous recombination.

[0450] The present invention also provides pharmaceutical compositions. Such compositions comprise a therapeutically effective amount of a compound, and a pharmaceutically acceptable carrier. In a specific embodiment, the term “pharmaceutically acceptable” means approved by a regulatory agency of the Federal or a state government or listed in the U.S. Pharmacopeia or other generally recognized pharmacopeia for use in animals, and more particularly in humans. The term “carrier” refers to a diluent, adjuvant, excipient, or vehicle with which the therapeutic is administered. Such pharmaceutical carriers can be sterile liquids, such as water and oils, including those of petroleum, animal, vegetable or synthetic origin, such as peanut oil, soybean oil, mineral oil, sesame oil and the like. Water is a preferred carrier when the pharmaceutical composition is administered intravenously. Saline solutions and aqueous dextrose and glycerol solutions can also be employed as liquid carriers, particularly for injectable solutions. Suitable pharmaceutical excipients include starch, glucose, lactose, sucrose, gelatin, malt, rice, flour, chalk, silica gel, sodium stearate, glycerol monostearate, talc, sodium chloride, dried skim milk, glycerol, propylene, glycol, water, ethanol and the like. The composition, if desired, can also contain minor amounts of wetting or emulsifying agents, or pH buffering agents. These compositions can take the form of solutions, suspensions, emulsion, tablets, pills, capsules, powders, sustained-release formulations and the like. The composition can be formulated as a suppository, with traditional binders and carriers such as triglycerides. Oral formulation can include standard carriers such as pharmaceutical grades of mannitol, lactose, starch, magnesium stearate, sodium saccharine, cellulose, magnesium carbonate, etc. Examples of suitable pharmaceutical carriers are described in “Remington's Pharmaceutical Sciences” by E. W. Martin. Such compositions will contain a therapeutically effective amount of the compound, preferably in purified form, together with a suitable amount of carrier so as to provide the form for proper administration to the patient. The formulation should suit the mode of administration.

[0451] In a preferred embodiment, the composition is formulated in accordance with routine procedures as a pharmaceutical composition adapted for intravenous administration to human beings. Typically, compositions for intravenous administration are solutions in sterile isotonic aqueous buffer. Where necessary, the composition may also include a solubilizing agent and a local anesthetic such as lignocaine to ease pain at the site of the injection. Generally, the ingredients are supplied either separately or mixed together in unit dosage form, for example, as a dry lyophilized powder or water free concentrate in a hermetically sealed container such as an ampoule or sachette indicating the quantity of active agent. Where the composition is to be administered by infusion, it can be dispensed with an infusion bottle containing sterile pharmaceutical grade water or saline. Where the composition is administered by injection, an ampoule of sterile water for injection or saline can be provided so that the ingredients may be mixed prior to administration.

[0452] The compounds of the invention can be formulated as neutral or salt forms. Pharmaceutically acceptable salts include those formed with anions such as those derived from hydrochloric, phosphoric, acetic, oxalic, tartaric acids, etc., and those formed with cations such as those derived from sodium, potassium, ammonium, calcium, ferric hydroxides, isopropylamine, triethylamine, 2-ethylamino ethanol, histidine, procaine, etc.

[0453] The amount of the compound of the invention which will be effective in the treatment, inhibition and prevention of a disease or disorder associated with aberrant expression and/or activity of a polypeptide of the invention can be determined by standard clinical techniques. In addition, in vitro assays may optionally be employed to help identify optimal dosage ranges. The precise dose to be employed in the formulation will also depend on the route of administration, and the seriousness of the disease or disorder, and should be decided according to the judgment of the practitioner and each patient's circumstances. Effective doses may be extrapolated from dose-response curves derived from in vitro or animal model test systems.

[0454] For antibodies, the dosage administered to a patient is typically 0.1 mg/kg to 100 mg/kg of the patient's body weight. Preferably, the dosage administered to a patient is between 0.1 mg/kg and 20 mg/kg of the patient's body weight, more preferably 1 mg/kg to 10 mg/kg of the patient's body weight. Generally, human antibodies have a longer half-life within the human body than antibodies from other species due to the immune response to the foreign polypeptides. Thus, lower dosages of human antibodies and less frequent administration is often possible. Further, the dosage and frequency of administration of antibodies of the invention may be reduced by enhancing uptake and tissue penetration (e.g., into the brain) of the antibodies by modifications such as, for example, lipidation.

[0455] The invention also provides a pharmaceutical pack or kit comprising one or more containers filled with one or more of the ingredients of the pharmaceutical compositions of the invention. Optionally associated with such container(s) can be a notice in the form prescribed by a governmental agency regulating the manufacture, use or sale of pharmaceuticals or biological products, which notice reflects approval by the agency of manufacture, use or sale for human administration.

Diagnosis and Imaging

[0456] Labeled antibodies, and derivatives and analogs thereof, which specifically bind to a polypeptide of interest can be used for diagnostic purposes to detect, diagnose, or monitor diseases, disorders, and/or conditions associated with the aberrant expression and/or activity of a polypeptide of the invention. The invention provides for the detection of aberrant expression of a polypeptide of interest, comprising (a) assaying the expression of the polypeptide of interest in cells or body fluid of an individual using one or more antibodies specific to the polypeptide interest and (b) comparing the level of gene expression with a standard gene expression level, whereby an increase or decrease in the assayed polypeptide gene expression level compared to the standard expression level is indicative of aberrant expression.

[0457] The invention provides a diagnostic assay for diagnosing a disorder, comprising (a) assaying the expression of the polypeptide of interest in cells or body fluid of an individual using one or more antibodies specific to the polypeptide interest and (b) comparing the level of gene expression with a standard gene expression level, whereby an increase or decrease in the assayed polypeptide gene expression level compared to the standard expression level is indicative of a particular disorder. With respect to cancer, the presence of a relatively high amount of transcript in biopsied tissue from an individual may indicate a predisposition for the development of the disease, or may provide a means for detecting the disease prior to the appearance of actual clinical symptoms. A more definitive diagnosis of this type may allow health professionals to employ preventative measures or aggressive treatment earlier thereby preventing the development or further progression of the cancer.

[0458] Antibodies of the invention can be used to assay protein levels in a biological sample using classical immunohistological methods known to those of skill in the art (e.g., see Jalkanen, et al., J. Cell. Biol. 101:976-985 (1985); Jalkanen, et al., J. Cell. Biol. 105:3087-3096 (1987)). Other antibody-based methods useful for detecting protein gene expression include immunoassays, such as the enzyme linked immunosorbent assay (ELISA) and the radioimmunoassay (RIA). Suitable antibody assay labels are known in the art and include enzyme labels, such as, glucose oxidase; radioisotopes, such as iodine (125I, 121I), carbon (14C), sulfur (35S), tritium (3H), indium (112In), and technetium (99Tc); luminescent labels, such as luminol; and fluorescent labels, such as fluorescein and rhodamine, and biotin.

[0459] One aspect of the invention is the detection and diagnosis of a disease or disorder associated with aberrant expression of a polypeptide of interest in an animal, preferably a mammal and most preferably a human. In one embodiment, diagnosis comprises: a) administering (for example, parenterally, subcutaneously, or intraperitoneally) to a subject an effective amount of a labeled molecule which specifically binds to the polypeptide of interest; b) waiting for a time interval following the administering for permitting the labeled molecule to preferentially concentrate at sites in the subject where the polypeptide is expressed (and for unbound labeled molecule to be cleared to background level); c) determining background level; and d) detecting the labeled molecule in the subject, such that detection of labeled molecule above the background level indicates that the subject has a particular disease or disorder associated with aberrant expression of the polypeptide of interest. Background level can be determined by various methods including, comparing the amount of labeled molecule detected to a standard value previously determined for a particular system.

[0460] It will be understood in the art that the size of the subject and the imaging system used will determine the quantity of imaging moiety needed to produce diagnostic images. In the case of a radioisotope moiety, for a human subject, the quantity of radioactivity injected will normally range from about 5 to 20 millicuries of 99mTc. The labeled antibody or antibody fragment will then preferentially accumulate at the location of cells which contain the specific protein. In vivo tumor imaging is described in S. W. Burchiel et al., “Immunopharmacokinetics of Radiolabeled Antibodies and Their Fragments.” (Chapter 13 in Tumor Imaging: The Radiochemical Detection of Cancer, S. W. Burchiel and B. A. Rhodes, eds., Masson Publishing Inc. (1982).

[0461] Depending on several variables, including the type of label used and the mode of administration, the time interval following the administration for permitting the labeled molecule to preferentially concentrate at sites in the subject and for unbound labeled molecule to be cleared to background level is 6 to 48 hours or 6 to 24 hours or 6 to 12 hours. In another embodiment the time interval following administration is 5 to 20 days or 5 to 10 days.

[0462] In an embodiment, monitoring of the disease or disorder is carried out by repeating the method for diagnosing the disease or disease, for example, one month after initial diagnosis, six months after initial diagnosis, one year after initial diagnosis, etc.

[0463] Presence of the labeled molecule can be detected in the patient using methods known in the art for in vivo scanning. These methods depend upon the type of label used. Skilled artisans will be able to determine the appropriate method for detecting a particular label. Methods and devices that may be used in the diagnostic methods of the invention include, but are not limited to, computed tomography (CT), whole body scan such as position emission tomography (PET), magnetic resonance imaging (MRI), and sonography.

[0464] In a specific embodiment, the molecule is labeled with a radioisotope and is detected in the patient using a radiation responsive surgical instrument (Thurston et al., U.S. Pat. No. 5,441,050). In another embodiment, the molecule is labeled with a fluorescent compound and is detected in the patient using a fluorescence responsive scanning instrument. In another embodiment, the molecule is labeled with a positron emitting metal and is detected in the patent using positron emission-tomography. In yet another embodiment, the molecule is labeled with a paramagnetic label and is detected in a patient using magnetic resonance imaging (MRI).

Kits

[0465] The present invention provides kits that can be used in the above methods. In one embodiment, a kit comprises an antibody of the invention, preferably a purified antibody, in one or more containers. In a specific embodiment, the kits of the present invention contain a substantially isolated polypeptide comprising an epitope which is specifically immunoreactive with an antibody included in the kit. Preferably, the kits of the present invention further comprise a control antibody which does not react with the polypeptide of interest. In another specific embodiment, the kits of the present invention contain a means for detecting the binding of an antibody to a polypeptide of interest (e.g., the antibody may be conjugated to a detectable substrate such as a fluorescent compound, an enzymatic substrate, a radioactive compound or a luminescent compound, or a second antibody which recognizes the first antibody may be conjugated to a detectable substrate).

[0466] In another specific embodiment of the present invention, the kit is a diagnostic kit for use in screening serum containing antibodies specific against proliferative and/or cancerous polynucleotides and polypeptides. Such a kit may include a control antibody that does not react with the polypeptide of interest. Such a kit may include a substantially isolated polypeptide antigen comprising an epitope which is specifically immunoreactive with at least one anti-polypeptide antigen antibody. Further, such a kit includes means for detecting the binding of said antibody to the antigen (e.g., the antibody may be conjugated to a fluorescent compound such as fluorescein or rhodamine which can be detected by flow cytometry). In specific embodiments, the kit may include a recombinantly produced or chemically synthesized polypeptide antigen. The polypeptide antigen of the kit may also be attached to a solid support.

[0467] In a more specific embodiment the detecting means of the above-described kit includes a solid support to which said polypeptide antigen is attached. Such a kit may also include a non-attached reporter-labeled anti-human antibody. In this embodiment, binding of the antibody to the polypeptide antigen can be detected by binding of the said reporter-labeled antibody.

[0468] In an additional embodiment, the invention includes a diagnostic kit for use in screening serum containing antigens of the polypeptide of the invention. The diagnostic kit includes a substantially isolated antibody specifically immunoreactive with polypeptide or polynucleotide antigens, and means for detecting the binding of the polynucleotide or polypeptide antigen to the antibody. In one embodiment, the antibody is attached to a solid support. In a specific embodiment, the antibody may be a monoclonal antibody. The detecting means of the kit may include a second, labeled monoclonal antibody. Alternatively, or in addition, the detecting means may include a labeled, competing antigen.

[0469] In one diagnostic configuration, test serum is reacted with a solid phase reagent having a surface-bound antigen obtained by the methods of the present invention. After binding with specific antigen antibody to the reagent and removing unbound serum components by washing, the reagent is reacted with reporter-labeled anti-human antibody to bind reporter to the reagent in proportion to the amount of bound anti-antigen antibody on the solid support. The reagent is again washed to remove unbound labeled antibody, and the amount of reporter associated with the reagent is determined. Typically, the reporter is an enzyme which is detected by incubating the solid phase in the presence of a suitable fluorometric, luminescent or colorimetric substrate (Sigma, St. Louis, Mo.).

[0470] The solid surface reagent in the above assay is prepared by known techniques for attaching protein material to solid support material, such as polymeric beads, dip sticks, 96-well plate or filter material. These attachment methods generally include non-specific adsorption of the protein to the support or covalent attachment of the protein, typically through a free amine group, to a chemically reactive group on the solid support, such as an activated carboxyl, hydroxyl, or aldehyde group. Alternatively, streptavidin coated plates can be used in conjunction with biotinylated antigen(s).

[0471] Thus, the invention provides an assay system or kit for carrying out this diagnostic method. The kit generally includes a support with surface-bound recombinant antigens, and a reporter-labeled anti-human antibody for detecting surface-bound anti-antigen antibody.

Fusion Proteins

[0472] Any polypeptide of the present invention can be used to generate fusion proteins. For example, the polypeptide of the present invention, when fused to a second protein, can be used as an antigenic tag. Antibodies raised against the polypeptide of the present invention can be used to indirectly detect the second protein by binding to the polypeptide. Moreover, because secreted proteins target cellular locations based on trafficking signals, the polypeptides of the present invention can be used as targeting molecules once fused to other proteins.

[0473] Examples of domains that can be fused to polypeptides of the present invention include not only heterologous signal sequences, but also other heterologous functional regions. The fusion does not necessarily need to be direct, but may occur through linker sequences.

[0474] Moreover, fusion proteins may also be engineered to improve characteristics of the polypeptide of the present invention. For instance, a region of additional amino acids, particularly charged amino acids, may be added to the N-terminus of the polypeptide to improve stability and persistence during purification from the host cell or subsequent handling and storage. Also, peptide moieties may be added to the polypeptide to facilitate purification. Such regions may be removed prior to final preparation of the polypeptide. The addition of peptide moieties to facilitate handling of polypeptides are familiar and routine techniques in the art.

[0475] Moreover, polypeptides of the present invention, including fragments, and specifically epitopes, can be combined with parts of the constant domain of immunoglobulins (IgA, IgE, IgG, IgM) or portions thereof (CH1, CH2, CH3, and any combination thereof, including both entire domains and portions thereof), resulting in chimeric polypeptides. These fusion proteins facilitate purification and show an increased half-life in vivo. One reported example describes chimeric proteins consisting of the first two domains of the human CD4-polypeptide and various domains of the constant regions of the heavy or light chains of mammalian immunoglobulins. (EP A 394,827; Traunecker et al., Nature 331:84-86 (1988).) Fusion proteins having disulfide-linked dimeric structures (due to the IgG) can also be more efficient in binding and neutralizing other molecules, than the monomeric secreted protein or protein fragment alone. (Fountoulakis et al., J. Biochem. 270:3958-3964 (1995).) Polynucleotides comprising or alternatively consisting of nucleic acids which encode these fusion proteins are also encompassed by the invention.

[0476] Similarly, EP-A-O 464 533 (Canadian counterpart 2045869) discloses fusion proteins comprising various portions of constant region of immunoglobulin molecules together with another human protein or part thereof. In many cases, the Fc part in a fusion protein is beneficial in therapy and diagnosis, and thus can result in, for example, improved pharmacokinetic properties. (EP-A 0232 262.) Alternatively, deleting the Fc part after the fusion protein has been expressed, detected, and purified, would be desired. For example, the Fc portion may hinder therapy and diagnosis if the fusion protein is used as an antigen for immunizations. In drug discovery, for example, human proteins, such as hIL-5, have been fused with Fc portions for the purpose of high-throughput screening assays to identify antagonists of hIL-5. (See, D. Bennett et al., J. Molecular Recognition 8:52-58 (1995); K. Johanson et al., J. Biol. Chem. 270:9459-9471 (1995).)

[0477] Moreover, the polypeptides of the present invention can be fused to marker sequences, such as a peptide which facilitates purification of the fused polypeptide. In preferred embodiments, the marker amino acid sequence is a hexa-histidine peptide, such as the tag provided in a pQE vector (QIAGEN, Inc., 9259 Eton Avenue, Chatsworth, Calif., 91311), among others, many of which are commercially available. As described in Gentz et al., Proc. Natl. Acad. Sci. USA 86:821-824 (1989), for instance, hexa-histidine provides for convenient purification of the fusion protein. Another peptide tag useful for purification, the “HA” tag, corresponds to an epitope derived from the influenza hemagglutinin protein. (Wilson et al., Cell 37:767 (1984).)

[0478] Thus, any of these above fusions can be engineered using the polynucleotides or the polypeptides of the present invention.

Vectors, Host Cells, and Protein Production

[0479] The present invention also relates to vectors containing the polynucleotide of the present invention, host cells, and the production of polypeptides by recombinant techniques. The vector may be, for example, a phage, plasmid, viral, or retroviral vector. Retroviral vectors may be replication competent or replication defective. In the latter case, viral propagation generally will occur only in complementing host cells.

[0480] The polynucleotides may be joined to a vector containing a selectable marker for propagation in a host. Generally, a plasmid vector is introduced in a precipitate, such as a calcium phosphate precipitate, or in a complex with a charged lipid. If the vector is a virus, it may be packaged in vitro using an appropriate packaging cell line and then transduced into host cells.

[0481] The polynucleotide insert should be operatively linked to an appropriate promoter, such as the phage lambda PL promoter, the E. coli lac, trp, phoA and tac promoters, the SV40 early and late promoters and promoters of retroviral LTRs, to name a few. Other suitable promoters will be known to the skilled artisan. The expression constructs will further contain sites for transcription initiation, termination, and, in the transcribed region, a ribosome binding site for translation. The coding portion of the transcripts expressed by the constructs will preferably include a translation initiating codon at the beginning and a termination codon (UAA, UGA or UAG) appropriately positioned at the end of the polypeptide to be translated.

[0482] As indicated, the expression vectors will preferably include at least one selectable marker. Such markers include dihydrofolate reductase, G418 or neomycin resistance for eukaryotic cell culture and tetracycline, kanamycin or ampicillin resistance genes for culturing in E. coli and other bacteria. Representative examples of appropriate hosts include, but are not limited to, bacterial cells, such as E. coli, Streptomyces and Salmonella typhimurium cells; fungal cells, such as yeast cells (e.g., Saccharomyces cerevisiae or Pichia pastoris (ATCC Accession No. 201178)); insect cells such as Drosophila S2 and Spodoptera Sf9 cells; animal cells such as CHO, COS, 293, and Bowes melanoma cells; and plant cells. Appropriate culture mediums and conditions for the above-described host cells are known in the art.

[0483] Among vectors preferred for use in bacteria include pQE70, pQE60 and pQE-9, available from QIAGEN, Inc.; pBluescript vectors, Phagescript vectors, pNH8A, pNH16a, pNH18A, pNH46A, available from Stratagene Cloning Systems, Inc.; and ptrc99a, pKK223-3, pKK233-3, pDR540, pRIT5 available from Pharmacia Biotech, Inc. Among preferred eukaryotic vectors are pWLNEO, pSV2CAT, pOG44, pXT1 and pSG available from Stratagene; and pSVK3, pBPV, pMSG and pSVL available from Pharmacia. Preferred expression vectors for use in yeast systems include, but are not limited to pYES2, pYD1, pTEF1/Zeo, pYES2/GS, pPICZ, pGAPZ, pGAPZalph, pPIC9, pPIC3.5, pHIL-D2, pHIL-S1, pPIC3.5K, pPIC9K, and PAO815 (all available from Invitrogen, Carlbad, Calif.). Other suitable vectors will be readily apparent to the skilled artisan.

[0484] Introduction of the construct into the host cell can be effected by calcium phosphate transfection, DEAE-dextran mediated transfection, cationic lipid-mediated transfection, electroporation, transduction, infection, or other methods. Such methods are described in many standard laboratory manuals, such as Davis et al., Basic Methods In Molecular Biology (1986). It is specifically contemplated that the polypeptides of the present invention may in fact be expressed by a host cell lacking a recombinant vector.

[0485] A polypeptide of this invention can be recovered and purified from recombinant cell cultures by well-known methods including ammonium sulfate or ethanol precipitation, acid extraction, anion or cation exchange chromatography, phosphocellulose chromatography, hydrophobic interaction chromatography, affinity chromatography, hydroxylapatite chromatography and lectin chromatography. Most preferably, high performance liquid chromatography (“HPLC”) is employed for purification.

[0486] Polypeptides of the present invention, and preferably the secreted form, can also be recovered from: products purified from natural sources, including bodily fluids, tissues and cells, whether directly isolated or cultured; products of chemical synthetic procedures; and products produced by recombinant techniques from a prokaryotic or eukaryotic host, including, for example, bacterial, yeast, higher plant, insect, and mammalian cells. Depending upon the host employed in a recombinant production procedure, the polypeptides of the present invention may be glycosylated or may be non-glycosylated. In addition, polypeptides of the invention may also include an initial modified methionine residue, in some cases as a result of host-mediated processes. Thus, it is well known in the art that the N-terminal methionine encoded by the translation initiation codon generally is removed with high efficiency from any protein after translation in all eukaryotic cells. While the N-terminal methionine on most proteins also is efficiently removed in most prokaryotes, for some proteins, this prokaryotic removal process is inefficient, depending on the nature of the amino acid to which the N-terminal methionine is covalently linked.

[0487] In one embodiment, the yeast Pichia pastoris is used to express the polypeptide of the present invention in a eukaryotic system. Pichia pastoris is a methylotrophic yeast which can metabolize methanol as its sole carbon source. A main step in the methanol metabolization pathway is the oxidation of methanol to formaldehyde using O₂. This reaction is catalyzed by the enzyme alcohol oxidase. In order to metabolize methanol as its sole carbon source, Pichia pastoris must generate high levels of alcohol oxidase due, in part, to the relatively low affinity of alcohol oxidase for O₂. Consequently, in a growth medium depending on methanol as a main carbon source, the promoter region of one of the two alcohol oxidase genes (AOXI) is highly active. In the presence of methanol, alcohol oxidase produced from the AOXI gene comprises up to approximately 30% of the total soluble protein in Pichia pastoris. See, Ellis, S. B., et al., Mol. Cell. Biol. 5:1111-21 (1985); Koutz, P. J, et al., Yeast 5:167-77 (1989); Tschopp, J. F., et al., Nucl. Acids Res. 15:3859-76 (1987). Thus, a heterologous coding sequence, such as, for example, a polynucleotide of the present invention, under the transcriptional regulation of all or part of the AOXI regulatory sequence is expressed at exceptionally high levels in Pichia yeast grown in the presence of methanol.

[0488] In one example, the plasmid vector pPIC9K is used to express DNA encoding a polypeptide of the invention, as set forth herein, in a Pichea yeast system essentially as described in “Pichia Protocols: Methods in Molecular Biology,” D. R. Higgins and J. Cregg, eds. The Humana Press, Totowa, N.J., 1998. This expression vector allows expression and secretion of a protein of the invention by virtue of the strong AOXI promoter linked to the Pichia pastoris alkaline phosphatase (PHO) secretory signal peptide (i.e., leader) located upstream of a multiple cloning site.

[0489] Many other yeast vectors could be used in place of pPIC9K, such as, pYES2, pYD1, pTEF1/Zeo, pYES2/GS, pPICZ, pGAPZ, pGAPZalpha, pPIC9, pPIC3.5, pHIL-D2, pHIL-S1, pPIC3.5K, and PAO815, as one skilled in the art would readily appreciate, as long as the proposed expression construct provides appropriately located signals for transcription, translation, secretion (if desired), and the like, including an in-frame AUG as required.

[0490] In another embodiment, high-level expression of a heterologous coding sequence, such as, for example, a polynucleotide of the present invention, may be achieved by cloning the heterologous polynucleotide of the invention into an expression vector such as, for example, pGAPZ or pGAPZalpha, and growing the yeast culture in the absence of methanol.

[0491] In addition to encompassing host cells containing the vector constructs discussed herein, the invention also encompasses primary, secondary, and immortalized host cells of vertebrate origin, particularly mammalian origin, that have been engineered to delete or replace endogenous genetic material (e.g., coding sequence), and/or to include genetic material (e.g., heterologous polynucleotide sequences) that is operably associated with the polynucleotides of the invention, and which activates, alters, and/or amplifies endogenous polynucleotides. For example, techniques known in the art may be used to operably associate heterologous control regions (e.g., promoter and/or enhancer) and endogenous polynucleotide sequences via homologous recombination, resulting in the formation of a new transcription unit (see, e.g., U.S. Pat. No. 5,641,670, issued Jun. 24, 1997; U.S. Pat. No. 5,733,761, issued Mar. 31, 1998; International Publication No. WO 96/29411, published Sep. 26, 1996; International Publication No. WO 94/12650, published Aug. 4, 1994; Koller et al., Proc. Natl. Acad. Sci. USA 86:8932-8935 (1989); and Zijlstra et al., Nature 342:435-438 (1989), the disclosures of each of which are incorporated by reference in their entireties).

[0492] In addition, polypeptides of the invention can be chemically synthesized using techniques known in the art (e.g., see Creighton, 1983, Proteins: Structures and Molecular Principles, W.H. Freeman & Co., N.Y., and Hunkapiller et al., Nature, 310:105-111 (1984)). For example, a polypeptide corresponding to a fragment of a polypeptide sequence of the invention can be synthesized by use of a peptide synthesizer. Furthermore, if desired, nonclassical amino acids or chemical amino acid analogs can be introduced as a substitution or addition into the polypeptide sequence. Non-classical amino acids include, but are not limited to, to the D-isomers of the common amino acids, 2,4-diaminobutyric acid, a-amino isobutyric acid, 4-aminobutyric acid, Abu, 2-amino butyric acid, g-Abu, e-Ahx, 6-amino hexanoic acid, Aib, 2-amino isobutyric acid, 3-amino propionic acid, ornithine, norleucine, norvaline, hydroxyproline, sarcosine, citrulline, homocitrulline, cysteic acid, t-butylglycine, t-butylalanine, phenylglycine, cyclohexylalanine, b-alanine, fluoro-amino acids, designer amino acids such as b-methyl amino acids, Ca-methyl amino acids, Na-methyl amino acids, and amino acid analogs in general. Furthermore, the amino acid can be D (dextrorotary) or L (levorotary).

[0493] The invention encompasses polypeptides which are differentially modified during or after translation, e.g., by glycosylation, acetylation, phosphorylation, amidation, derivatization by known protecting/blocking groups, proteolytic cleavage, linkage to an antibody molecule or other cellular ligand, etc. Any of numerous chemical modifications may be carried out by known techniques, including but not limited, to specific chemical cleavage by cyanogen bromide, trypsin, chymotrypsin, papain, V8 protease, NaBH₄; acetylation, formylation, oxidation, reduction; metabolic synthesis in the presence of tunicamycin; etc.

[0494] Additional post-translational modifications encompassed by the invention include, for example, e.g., N-linked or O-linked carbohydrate chains, processing of N-terminal or C-terminal ends), attachment of chemical moieties to the amino acid backbone, chemical modifications of N-linked or O-linked carbohydrate chains, and addition or deletion of an N-terminal methionine residue as a result of procaryotic host cell expression. The polypeptides may also be modified with a detectable label, such as an enzymatic, fluorescent, isotopic or affinity label to allow for detection and isolation of the protein.

[0495] Also provided by the invention are chemically modified derivatives of the polypeptides of the invention which may provide additional advantages such as increased solubility, stability and circulating time of the polypeptide, or decreased immunogenicity (see U.S. Pat. No. 4,179,337). The chemical moieties for derivitization may be selected from water soluble polymers such as polyethylene glycol, ethylene glycol/propylene glycol copolymers, carboxymethylcellulose, dextran, polyvinyl alcohol and the like. The polypeptides may be modified at random positions within the molecule, or at predetermined positions within the molecule and may include one, two, three or more attached chemical moieties.

[0496] The polymer may be of any molecular weight, and may be branched or unbranched. For polyethylene glycol, the preferred molecular weight is between about 1 kDa and about 100 kDa (the term “about” indicating that in preparations of polyethylene glycol, some molecules will weigh more, some less, than the stated molecular weight) for ease in handling and manufacturing. Other sizes may be used, depending on the desired therapeutic profile (e.g., the duration of sustained release desired, the effects, if any on biological activity, the ease in handling, the degree or lack of antigenicity and other known effects of the polyethylene glycol to a therapeutic protein or analog). For example, the polyethylene glycol may have an average molecular weight of about 200, 500, 1000, 1500, 2000, 2500, 3000, 3500, 4000, 4500, 5000, 5500, 6000, 6500, 7000, 7500, 8000, 8500, 9000, 9500, 10,000, 10,500, 11,000, 11,500, 12,000, 12,500, 13,000, 13,500, 14,000, 14,500, 15,000, 15,500, 16,000, 16,500, 17,000, 17,500, 18,000, 18,500, 19,000, 19,500, 20,000, 25,000, 30,000, 35,000, 40,000, 50,000, 55,000, 60,000, 65,000, 70,000, 75,000, 80,000, 85,000, 90,000, 95,000, or 100,000 kDa.

[0497] As noted above, the polyethylene glycol may have a branched structure. Branched polyethylene glycols are described, for example, in U.S. Pat. No. 5,643,575; Morpurgo et al., Appl. Biochem. Biotechnol. 56:59-72 (1996); Vorobjev et al., Nucleosides Nucleotides 18:2745-2750 (1999); and Caliceti et al., Bioconjug. Chem. 10:638-646 (1999), the disclosures of each of which are incorporated herein by reference.

[0498] The polyethylene glycol molecules (or other chemical moieties) should be attached to the protein with consideration of effects on functional or antigenic domains of the protein. There are a number of attachment methods available to those skilled in the art, e.g., EP 0 401 384, herein incorporated by reference (coupling PEG to G-CSF), see also Malik et al., Exp. Hematol. 20:1028-1035 (1992) (reporting pegylation of GM-CSF using tresyl chloride). For example, polyethylene glycol may be covalently bound through amino acid residues via a reactive group, such as, a free amino or carboxyl group. Reactive groups are those to which an activated polyethylene glycol molecule may be bound. The amino acid residues having a free amino group may include lysine residues and the N-terminal amino acid residues; those having a free carboxyl group may include aspartic acid residues glutamic acid residues and the C-terminal amino acid residue. Sulfhydryl groups may also be used as a reactive group for attaching the polyethylene glycol molecules. Preferred for therapeutic purposes is attachment at an amino group, such as attachment at the N-terminus or lysine group.

[0499] As suggested above, polyethylene glycol may be attached to proteins via linkage to any of a number of amino acid residues. For example, polyethylene glycol can be linked to a proteins via covalent bonds to lysine, histidine, aspartic acid, glutamic acid, or cysteine residues. One or more reaction chemistries may be employed to attach polyethylene glycol to specific amino acid residues (e.g., lysine, histidine, aspartic acid, glutamic acid, or cysteine) of the protein or to more than one type of amino acid residue (e.g., lysine, histidine, aspartic acid, glutamic acid, cysteine and combinations thereof) of the protein.

[0500] One may specifically desire proteins chemically modified at the N-terminus. Using polyethylene glycol as an illustration of the present composition, one may select from a variety of polyethylene glycol molecules (by molecular weight, branching, etc.), the proportion of polyethylene glycol molecules to protein (polypeptide) molecules in the reaction mix, the type of pegylation reaction to be performed, and the method of obtaining the selected N-terminally pegylated protein. The method of obtaining the N-terminally pegylated preparation (i.e., separating this moiety from other monopegylated moieties if necessary) may be by purification of the N-terminally pegylated material from a population of pegylated protein molecules. Selective proteins chemically modified at the N-terminus modification may be accomplished by reductive alkylation which exploits differential reactivity of different types of primary amino groups (lysine versus the N-terminal) available for derivatization in a particular protein. Under the appropriate reaction conditions, substantially selective derivatization of the protein at the N-terminus with a carbonyl group containing polymer is achieved.

[0501] As indicated above, pegylation of the proteins of the invention may be accomplished by any number of means. For example, polyethylene glycol may be attached to the protein either directly or by an intervening linker. Linkerless systems for attaching polyethylene glycol to proteins are described in Delgado et al., Crit. Rev. Thera. Drug Carrier Sys. 9:249-304 (1992); Francis et al., Intern. J of Hematol. 68:1-18 (1998); U.S. Pat. No. 4,002,531; U.S. Pat. No. 5,349,052; WO 95/06058; and WO 98/32466, the disclosures of each of which are incorporated herein by reference.

[0502] One system for attaching polyethylene glycol directly to amino acid residues of proteins without an intervening linker employs tresylated MPEG, which is produced by the modification of monmethoxy polyethylene glycol (MPEG) using tresylchloride (ClSO₂CH₂CF₃). Upon reaction of protein with tresylated MPEG, polyethylene glycol is directly attached to amine groups of the protein. Thus, the invention includes protein-polyethylene glycol conjugates produced by reacting proteins of the invention with a polyethylene glycol molecule having a 2,2,2-trifluoreothane sulphonyl group.

[0503] Polyethylene glycol can also be attached to proteins using a number of different intervening linkers. For example, U.S. Pat. No. 5,612,460, the entire disclosure of which is incorporated herein by reference, discloses urethane linkers for connecting polyethylene glycol to proteins. Protein-polyethylene glycol conjugates wherein the polyethylene glycol is attached to the protein by a linker can also be produced by reaction of proteins with compounds such as MPEG-succinimidylsuccinate, MPEG activated with 1,1′-carbonyldiimidazole, MPEG-2,4,5-trichloropenylcarbonate, MPEG-p-nitrophenolcarbonate, and various MPEG-succinate derivatives. A number additional polyethylene glycol derivatives and reaction chemistries for attaching polyethylene glycol to proteins are described in WO 98/32466, the entire disclosure of which is incorporated herein by reference. Pegylated protein products produced using the reaction chemistries set out herein are included within the scope of the invention.

[0504] The number of polyethylene glycol moieties attached to each protein of the invention (i.e., the degree of substitution) may also vary. For example, the pegylated proteins of the invention may be linked, on average, to 1, 2, 3, 4, 5, 6, 7, 8, 9, 10, 12, 15, 17, 20, or more polyethylene glycol molecules. Similarly, the average degree of substitution within ranges such as 1-3, 2-4, 3-5, 4-6, 5-7, 6-8, 7-9, 8-10, 9-11, 10-12, 11-13, 12-14, 13-15, 14-16, 15-17, 16-18, 17-19, or 18-20 polyethylene glycol moieties per protein molecule. Methods for determining the degree of substitution are discussed, for example, in Delgado et al., Crit. Rev. Thera. Drug Carrier Sys. 9:249-304 (1992).

[0505] The polypeptides of the invention may be in monomers or multimers (i.e., dimers, trimers, tetramers and higher multimers). Accordingly, the present invention relates to monomers and multimers of the polypeptides of the invention, their preparation, and compositions (preferably, Therapeutics) containing them. In specific embodiments, the polypeptides of the invention are monomers, dimers, trimers or tetramers. In additional embodiments, the multimers of the invention are at least dimers, at least trimers, or at least tetramers.

[0506] Multimers encompassed by the invention may be homomers or heteromers. As used herein, the term homomer, refers to a multimer containing only polypeptides corresponding to the amino acid sequence of SEQ ID NO:Y or encoded by the cDNA contained in a deposited clone (including fragments, variants, splice variants, and fusion proteins, corresponding to these polypeptides as described herein). These homomers may contain polypeptides having identical or different amino acid sequences. In a specific embodiment, a homomer of the invention is a multimer containing only polypeptides having an identical amino acid sequence. In another specific embodiment, a homomer of the invention is a multimer containing polypeptides having different amino acid sequences. In specific embodiments, the multimer of the invention is a homodimer (e.g., containing polypeptides having identical or different amino acid sequences) or a homotrimer (e.g., containing polypeptides having identical and/or different amino acid sequences). In additional embodiments, the homomeric multimer of the invention is at least a homodimer, at least a homotrimer, or at least a homotetramer.

[0507] As used herein, the term heteromer refers to a multimer containing one or more heterologous polypeptides (i.e., polypeptides of different proteins) in addition to the polypeptides of the invention. In a specific embodiment, the multimer of the invention is a heterodimer, a heterotrimer, or a heterotetramer. In additional embodiments, the heteromeric multimer of the invention is at least a heterodimer, at least a heterotrimer, or at least a heterotetramer.

[0508] Multimers of the invention may be the result of hydrophobic, hydrophilic, ionic and/or covalent associations and/or may be indirectly linked, by for example, liposome formation. Thus, in one embodiment, multimers of the invention, such as, for example, homodimers or homotrimers, are formed when polypeptides of the invention contact one another in solution. In another embodiment, heteromultimers of the invention, such as, for example, heterotrimers or heterotetramers, are formed when polypeptides of the invention contact antibodies to the polypeptides of the invention (including antibodies to the heterologous polypeptide sequence in a fusion protein of the invention) in solution. In other embodiments, multimers of the invention are formed by covalent associations with and/or between the polypeptides of the invention. Such covalent associations may involve one or more amino acid residues contained in the polypeptide sequence (e.g., that recited in the sequence listing, or contained in the polypeptide encoded by a deposited clone). In one instance, the covalent associations are cross-linking between cysteine residues located within the polypeptide sequences which interact in the native (i.e., naturally occurring) polypeptide. In another instance, the covalent associations are the consequence of chemical or recombinant manipulation. Alternatively, such covalent associations may involve one or more amino acid residues contained in the heterologous polypeptide sequence in a fusion protein of the invention.

[0509] In one example, covalent associations are between the heterologous sequence contained in a fusion protein of the invention (see, e.g., U.S. Pat. No. 5,478,925). In a specific example, the covalent associations are between the heterologous sequence contained in an Fc fusion protein of the invention (as described herein). In another specific example, covalent associations of fusion proteins of the invention are between heterologous polypeptide sequence from another protein that is capable of forming covalently associated multimers, such as for example, oseteoprotegerin (see, e.g., International Publication NO: WO 98/49305, the contents of which are herein incorporated by reference in its entirety). In another embodiment, two or more polypeptides of the invention are joined through peptide linkers. Examples include those peptide linkers described in U.S. Pat. No. 5,073,627 (hereby incorporated by reference). Proteins comprising multiple polypeptides of the invention separated by peptide linkers may be produced using conventional recombinant DNA technology.

[0510] Another method for preparing multimer polypeptides of the invention involves use of polypeptides of the invention fused to a leucine zipper or isoleucine zipper polypeptide sequence. Leucine zipper and isoleucine zipper domains are polypeptides that promote multimerization of the proteins in which they are found. Leucine zippers were originally identified in several DNA-binding proteins (Landschulz et al., Science 240:1759, (1988)), and have since been found in a variety of different proteins. Among the known leucine zippers are naturally occurring peptides and derivatives thereof that dimerize or trimerize. Examples of leucine zipper domains suitable for producing soluble multimeric proteins of the invention are those described in PCT application WO 94/10308, hereby incorporated by reference. Recombinant fusion proteins comprising a polypeptide of the invention fused to a polypeptide sequence that dimerizes or trimerizes in solution are expressed in suitable host cells, and the resulting soluble multimeric fusion protein is recovered from the culture supernatant using techniques known in the art.

[0511] Trimeric polypeptides of the invention may offer the advantage of enhanced biological activity. Preferred leucine zipper moieties and isoleucine moieties are those that preferentially form trimers. One example is a leucine zipper derived from lung surfactant protein D (SPD), as described in Hoppe et al. (FEBS Letters 344:191, (1994)) and in U.S. patent application Ser. No. 08/446,922, hereby incorporated by reference. Other peptides derived from naturally occurring trimeric proteins may be employed in preparing trimeric polypeptides of the invention.

[0512] In another example, proteins of the invention are associated by interactions between Flag® polypeptide sequence contained in fusion proteins of the invention containing Flag® polypeptide seuqence. In a further embodiment, associations proteins of the invention are associated by interactions between heterologous polypeptide sequence contained in Flag® fusion proteins of the invention and anti-Flag® antibody.

[0513] The multimers of the invention may be generated using chemical techniques known in the art. For example, polypeptides desired to be contained in the multimers of the invention may be chemically cross-linked using linker molecules and linker molecule length optimization techniques known in the art (see, e.g., U.S. Pat. No. 5,478,925, which is herein incorporated by reference in its entirety). Additionally, multimers of the invention may be generated using techniques known in the art to form one or more inter-molecule cross-links between the cysteine residues located within the sequence of the polypeptides desired to be contained in the multimer (see, e.g., U.S. Pat. No. 5,478,925, which is herein incorporated by reference in its entirety). Further, polypeptides of the invention may be routinely modified by the addition of cysteine or biotin to the C terminus or N-terminus of the polypeptide and techniques known in the art may be applied to generate multimers containing one or more of these modified polypeptides (see, e.g., U.S. Pat. No. 5,478,925, which is herein incorporated by reference in its entirety).

[0514] Additionally, techniques known in the art may be applied to generate liposomes containing the polypeptide components desired to be contained in the multimer of the invention (see, e.g., U.S. Pat. No. 5,478,925, which is herein incorporated by reference in its entirety).

[0515] Alternatively, multimers of the invention may be generated using genetic engineering techniques known in the art. In one embodiment, polypeptides contained in multimers of the invention are produced recombinantly using fusion protein technology described herein or otherwise known in the art (see, e.g., U.S. Pat. No. 5,478,925, which is herein incorporated by reference in its entirety). In a specific embodiment, polynucleotides coding for a homodimer of the invention are generated by ligating a polynucleotide sequence encoding a polypeptide of the invention to a sequence encoding a linker polypeptide and then further to a synthetic polynucleotide encoding the translated product of the polypeptide in the reverse orientation from the original C-terminus to the N-terminus (lacking the leader sequence) (see, e.g., U.S. Pat. No. 5,478,925, which is herein incorporated by reference in its entirety). In another embodiment, recombinant techniques described herein or otherwise known in the art are applied to generate recombinant polypeptides of the invention which contain a transmembrane domain (or hyrophobic or signal peptide) and which can be incorporated by membrane reconstitution techniques into liposomes (see, e.g., U.S. Pat. No. 5,478,925, which is herein incorporated by reference in its entirety).

Uses of the Polynucleotides

[0516] Each of the polynucleotides identified herein can be used in numerous ways as reagents. The following description should be considered exemplary and utilizes known techniques.

[0517] The polynucleotides of the present invention are useful for chromosome identification. There exists an ongoing need to identify new chromosome markers, since few chromosome marking reagents, based on actual sequence data (repeat polymorphisms), are presently available. Each polynucleotide of the present invention can be used as a chromosome marker.

[0518] Briefly, sequences can be mapped to chromosomes by preparing PCR primers (preferably 15-25 bp) from the sequences shown in SEQ ID NO:X. Primers can be selected using computer analysis so that primers do not span more than one predicted exon in the genomic DNA. These primers are then used for PCR screening of somatic cell hybrids containing individual human chromosomes. Only those hybrids containing the human gene corresponding to the SEQ ID NO:X will yield an amplified fragment.

[0519] Similarly, somatic hybrids provide a rapid method of PCR mapping the polynucleotides to particular chromosomes. Three or more clones can be assigned per day using a single thermal cycler. Moreover, sublocalization of the polynucleotides can be achieved with panels of specific chromosome fragments. Other gene mapping strategies that can be used include in situ hybridization, prescreening with labeled flow-sorted chromosomes, preselection by hybridization to construct chromosome specific-cDNA libraries and computer mapping techniques (See, e.g., Shuler, Trends Biotechnol 16:456-459 (1998) which is hereby incorporated by reference in its entirety).

[0520] Precise chromosomal location of the polynucleotides can also be achieved using fluorescence in situ hybridization (FISH) of a metaphase chromosomal spread. This technique uses polynucleotides as short as 500 or 600 bases; however, polynucleotides 2,000-4,000 bp are preferred. For a review of this technique, see Verma et al., “Human Chromosomes: a Manual of Basic Techniques,” Pergamon Press, New York (1988).

[0521] For chromosome mapping, the polynucleotides can be used individually (to mark a single chromosome or a single site on that chromosome) or in panels (for marking multiple sites and/or multiple chromosomes).

[0522] The polynucleotides of the present invention would likewise be useful for radiation hybrid mapping, HAPPY mapping, and long range restriction mapping. For a review of these techniques and others known in the art, see, e.g., Dear, “Genome Mapping: A Practical Approach,” IRL Press at Oxford University Press, London (1997); Aydin, J. Mol. Med. 77:691-694 (1999); Hacia et al., Mol. Psychiatry 3:483-492 (1998); Herrick et al., Chromosome Res. 7:409-423 (1999); Hamilton et al., Methods Cell Biol. 62:265-280 (2000); and/or Ott, J. Hered. 90:68-70 (1999) each of which is hereby incorporated by reference in its entirety.

[0523] Once a polynucleotide has been mapped to a precise chromosomal location, the physical position of the polynucleotide can be used in linkage analysis. Linkage analysis establishes coinheritance between a chromosomal location and presentation of a particular disease. (Disease mapping data are found, for example, in V. McKusick, Mendelian Inheritance in Man (available on line through Johns Hopkins University Welch Medical Library).) Assuming 1 megabase mapping resolution and one gene per 20 kb, a cDNA precisely localized to a chromosomal region associated with the disease could be one of 50-500 potential causative genes.

[0524] Thus, once coinheritance is established, differences in the polynucleotide and the corresponding gene between affected and unaffected individuals can be examined. First, visible structural alterations in the chromosomes, such as deletions or translocations, are examined in chromosome spreads or by PCR. If no structural alterations exist, the presence of point mutations are ascertained. Mutations observed in some or all affected individuals, but not in normal individuals, indicates that the mutation may cause the disease. However, complete sequencing of the polypeptide and the corresponding gene from several normal individuals is required to distinguish the mutation from a polymorphism. If a new polymorphism is identified, this polymorphic polypeptide can be used for further linkage analysis.

[0525] Furthermore, increased or decreased expression of the gene in affected individuals as compared to unaffected individuals can be assessed using polynucleotides of the present invention. Any of these alterations (altered expression, chromosomal rearrangement, or mutation) can be used as a diagnostic or prognostic marker.

[0526] Thus, the invention also provides a diagnostic method useful during diagnosis of a disorder, involving measuring the expression level of polynucleotides of the present invention in cells or body fluid from an individual and comparing the measured gene expression level with a standard level of polynucleotide expression level, whereby an increase or decrease in the gene expression level compared to the standard is indicative of a disorder.

[0527] In still another embodiment, the invention includes a kit for analyzing samples for the presence of proliferative and/or cancerous polynucleotides derived from a test subject. In a general embodiment, the kit includes at least one polynucleotide probe containing a nucleotide sequence that will specifically hybridize with a polynucleotide of the present invention and a suitable container. In a specific embodiment, the kit includes two polynucleotide probes defining an internal region of the polynucleotide of the present invention, where each probe has one strand containing a 31'mer-end internal to the region. In a further embodiment, the probes may be useful as primers for polymerase chain reaction amplification.

[0528] Where a diagnosis of a disorder, has already been made according to conventional methods, the present invention is useful as a prognostic indicator, whereby patients exhibiting enhanced or depressed polynucleotide of the present invention expression will experience a worse clinical outcome relative to patients expressing the gene at a level nearer the standard level.

[0529] By “measuring the expression level of polynucleotide of the present invention” is intended qualitatively or quantitatively measuring or estimating the level of the polypeptide of the present invention or the level of the mRNA encoding the polypeptide in a first biological sample either directly (e.g., by determining or estimating absolute protein level or mRNA level) or relatively (e.g., by comparing to the polypeptide level or mRNA level in a second biological sample). Preferably, the polypeptide level or mRNA level in the first biological sample is measured or estimated and compared to a standard polypeptide level or mRNA level, the standard being taken from a second biological sample obtained from an individual not having the disorder or being determined by averaging levels from a population of individuals not having a disorder. As will be appreciated in the art, once a standard polypeptide level or mRNA level is known, it can be used repeatedly as a standard for comparison.

[0530] By “biological sample” is intended any biological sample obtained from an individual, body fluid, cell line, tissue culture, or other source which contains the polypeptide of the present invention or mRNA. As indicated, biological samples include body fluids (such as semen, lymph, sera, plasma, urine, synovial fluid and spinal fluid) which contain the polypeptide of the present invention, and other tissue sources found to express the polypeptide of the present invention. Methods for obtaining tissue biopsies and body fluids from mammals are well known in the art. Where the biological sample is to include mRNA, a tissue biopsy is the preferred source.

[0531] The method(s) provided above may preferrably be applied in a diagnostic method and/or kits in which polynucleotides and/or polypeptides are attached to a solid support. In one exemplary method, the support may be a “gene chip” or a “biological chip” as described in U.S. Pat. Nos. 5,837,832, 5,874,219, and 5,856,174. Further, such a gene chip with polynucleotides of the present invention attached may be used to identify polymorphisms between the polynucleotide sequences, with polynucleotides isolated from a test subject. The knowledge of such polymorphisms (i.e. their location, as well as, their existence) would be beneficial in identifying disease loci for many disorders, including cancerous diseases and conditions. Such a method is described in U.S. Pat. Nos. 5,858,659 and 5,856,104. The US patents referenced supra are hereby incorporated by reference in their entirety herein.

[0532] The present invention encompasses polynucleotides of the present invention that are chemically synthesized, or reproduced as peptide nucleic acids (PNA), or according to other methods known in the art. The use of PNAs would serve as the preferred form if the polynucleotides are incorporated onto a solid support, or gene chip. For the purposes of the present invention, a peptide nucleic acid (PNA) is a polyamide type of DNA analog and the monomeric units for adenine, guanine, thymine and cytosine are available commercially (Perceptive Biosystems). Certain components of DNA, such as phosphorus, phosphorus oxides, or deoxyribose derivatives, are not present in PNAs. As disclosed by P. E. Nielsen, M. Egholm, R. H. Berg and O. Buchardt, Science 254, 1497 (1991); and M. Egholm, O. Buchardt, L. Christensen, C. Behrens, S. M. Freier, D. A. Driver, R. H. Berg, S. K. Kim, B. Norden, and P. E. Nielsen, Nature 365, 666 (1993), PNAs bind specifically and tightly to complementary DNA strands and are not degraded by nucleases. In fact, PNA binds more strongly to DNA than DNA itself does. This is probably because there is no electrostatic repulsion between the two strands, and also the polyamide backbone is more flexible. Because of this, PNA/DNA duplexes bind under a wider range of stringency conditions than DNA/DNA duplexes, making it easier to perform multiplex hybridization. Smaller probes can be used than with DNA due to the strong binding. In addition, it is more likely that single base mismatches can be determined with PNA/DNA hybridization because a single mismatch in a PNA/DNA 15-mer lowers the melting point (T.sub.m) by 8°-20° C., vs. 4°-16° C. for the DNA/DNA 15-mer duplex. Also, the absence of charge groups in PNA means that hybridization can be done at low ionic strengths and reduce possible interference by salt during the analysis.

[0533] The present invention is useful for detecting cancer in mammals. In particular the invention is useful during diagnosis of pathological cell proliferative neoplasias which include, but are not limited to: acute myelogenous leukemias including acute monocytic leukemia, acute myeloblastic leukemia, acute promyelocytic leukemia, acute myelomonocytic leukemia, acute erythroleukemia, acute megakaryocytic leukemia, and acute undifferentiated leukemia, etc.; and chronic myelogenous leukemias including chronic myelomonocytic leukemia, chronic granulocytic leukemia, etc. Preferred mammals include monkeys, apes, cats, dogs, cows, pigs, horses, rabbits and humans. Particularly preferred are humans.

[0534] Pathological cell proliferative diseases, disorders, and/or conditions are often associated with inappropriate activation of proto-oncogenes. (Gelmann, E. P. et al., “The Etiology of Acute Leukemia: Molecular Genetics and Viral Oncology,” in Neoplastic Diseases of the Blood, Vol 1., Wiernik, P. H. et al. eds., 161-182 (1985)). Neoplasias are now believed to result from the qualitative alteration of a normal cellular gene product, or from the quantitative modification of gene expression by insertion into the chromosome of a viral sequence, by chromosomal translocation of a gene to a more actively transcribed region, or by some other mechanism. (Gelmann et al., supra) It is likely that mutated or altered expression of specific genes is involved in the pathogenesis of some leukemias, among other tissues and cell types. (Gelmann et al., supra) Indeed, the human counterparts of the oncogenes involved in some animal neoplasias have been amplified or translocated in some cases of human leukemia and carcinoma. (Gelmann et al., supra).

[0535] For example, c-myc expression is highly amplified in the non-lymphocytic leukemia cell line HL-60. When HL-60 cells are chemically induced to stop proliferation, the level of c-myc is found to be downregulated. (International Publication Number WO 91/15580) However, it has been shown that exposure of HL-60 cells to a DNA construct that is complementary to the 5′ end of c-myc or c-myb blocks translation of the corresponding mRNAs which downregulates expression of the c-myc or c-myb proteins and causes arrest of cell proliferation and differentiation of the treated cells. (International Publication Number WO 91/15580; Wickstrom et al., Proc. Natl. Acad. Sci. 85:1028 (1988); Anfossi et al., Proc. Natl. Acad. Sci. 86:3379 (1989)). However, the skilled artisan would appreciate the present invention's usefulness would not be limited to treatment of proliferative diseases, disorders, and/or conditions of hematopoietic cells and tissues, in light of the numerous cells and cell types of varying origins which are known to exhibit proliferative phenotypes.

[0536] In addition to the foregoing, a polynucleotide can be used to control gene expression through triple helix formation or antisense DNA or RNA. Antisense techniques are discussed, for example, in Okano, J. Neurochem. 56: 560 (1991); “Oligodeoxynucleotides as Antisense Inhibitors of Gene Expression, CRC Press, Boca Raton, Fla. (1988). Triple helix formation is discussed in, for instance Lee et al., Nucleic Acids Research 6: 3073 (1979); Cooney et al., Science 241: 456 (1988); and Dervan et al., Science 251: 1360 (1991). Both methods rely on binding of the polynucleotide to a complementary DNA or RNA. For these techniques, preferred polynucleotides are usually oligonucleotides 20 to 40 bases in length and complementary to either the region of the gene involved in transcription (triple helix—see Lee et al., Nucl. Acids Res. 6:3073 (1979); Cooney et al., Science 241:456 (1988); and Dervan et al., Science 251:1360 (1991)) or to the mRNA itself (antisense—Okano, J. Neurochem. 56:560 (1991); Oligodeoxy-nucleotides as Antisense Inhibitors of Gene Expression, CRC Press, Boca Raton, Fla. (1988).) Triple helix formation optimally results in a shut-off of RNA transcription from DNA, while antisense RNA hybridization blocks translation of an mRNA molecule into polypeptide. Both techniques are effective in model systems, and the information disclosed herein can be used to design antisense or triple helix polynucleotides in an effort to treat or prevent disease.

[0537] Polynucleotides of the present invention are also useful in gene therapy. One goal of gene therapy is to insert a normal gene into an organism having a defective gene, in an effort to correct the genetic defect. The polynucleotides disclosed in the present invention offer a means of targeting such genetic defects in a highly accurate manner. Another goal is to insert a new gene that was not present in the host genome, thereby producing a new trait in the host cell.

[0538] The polynucleotides are also useful for identifying individuals from minute biological samples. The United States military, for example, is considering the use of restriction fragment length polymorphism (RFLP) for identification of its personnel. In this technique, an individual's genomic DNA is digested with one or more restriction enzymes, and probed on a Southern blot to yield unique bands for identifying personnel. This method does not suffer from the current limitations of “Dog Tags” which can be lost, switched, or stolen, making positive identification difficult. The polynucleotides of the present invention can be used as additional DNA markers for RFLP.

[0539] The polynucleotides of the present invention can also be used as an alternative to RFLP, by determining the actual base-by-base DNA sequence of selected portions of an individual's genome. These sequences can be used to prepare PCR primers for amplifying and isolating such selected DNA, which can then be sequenced. Using this technique, individuals can be identified because each individual will have a unique set of DNA sequences. Once an unique ID database is established for an individual, positive identification of that individual, living or dead, can be made from extremely small tissue samples.

[0540] Forensic biology also benefits from using DNA-based identification techniques as disclosed herein. DNA sequences taken from very small biological samples such as tissues, e.g., hair or skin, or body fluids, e.g., blood, saliva, semen, synovial fluid, amniotic fluid, breast milk, lymph, pulmonary sputum or surfactant, urine, fecal matter, etc., can be amplified using PCR. In one prior art technique, gene sequences amplified from polymorphic loci, such as DQa class II HLA gene, are used in forensic biology to identify individuals. (Erlich, H., PCR Technology, Freeman and Co. (1992).) Once these specific polymorphic loci are amplified, they are digested with one or more restriction enzymes, yielding an identifying set of bands on a Southern blot probed with DNA corresponding to the DQa class II HLA gene. Similarly, polynucleotides of the present invention can be used as polymorphic markers for forensic purposes.

[0541] There is also a need for reagents capable of identifying the source of a particular tissue. Such need arises, for example, in forensics when presented with tissue of unknown origin. Appropriate reagents can comprise, for example, DNA probes or primers specific to particular tissue prepared from the sequences of the present invention. Panels of such reagents can identify tissue by species and/or by organ type. In a similar fashion, these reagents can be used to screen tissue cultures for contamination.

[0542] In the very least, the polynucleotides of the present invention can be used as molecular weight markers on Southern gels, as diagnostic probes for the presence of a specific mRNA in a particular cell type, as a probe to “subtract-out” known sequences in the process of discovering novel polynucleotides, for selecting and making oligomers for attachment to a “gene chip” or other support, to raise anti-DNA antibodies using DNA immunization techniques, and as an antigen to elicit an immune response.

Uses of the Polypeptides

[0543] Each of the polypeptides identified herein can be used in numerous ways. The following description should be considered exemplary and utilizes known techniques.

[0544] A polypeptide of the present invention can be used to assay protein levels in a biological sample using antibody-based techniques. For example, protein expression in tissues can be studied with classical immunohistological methods. (Jalkanen, M., et al., J. Cell. Biol. 101:976-985 (1985); Jalkanen, M., et al., J. Cell. Biol. 105:3087-3096 (1987).) Other antibody-based methods useful for detecting protein gene expression include immunoassays, such as the enzyme linked immunosorbent assay (ELISA) and the radioimmunoassay (RIA). Suitable antibody assay labels are known in the art and include enzyme labels, such as, glucose oxidase, and radioisotopes, such as iodine (125I, 121I), carbon (14C), sulfur (35S), tritium (3H), indium (112In), and technetium (99mTc), and fluorescent labels, such as fluorescein and rhodamine, and biotin.

[0545] In addition to assaying secreted protein levels in a biological sample, proteins can also be detected in vivo by imaging. Antibody labels or markers for in vivo imaging of protein include those detectable by X-radiography, NMR or ESR. For X-radiography, suitable labels include radioisotopes such as barium or cesium, which emit detectable radiation but are not overtly harmful to the subject. Suitable markers for NMR and ESR include those with a detectable characteristic spin, such as deuterium, which may be incorporated into the antibody by labeling of nutrients for the relevant hybridoma.

[0546] A protein-specific antibody or antibody fragment which has been labeled with an appropriate detectable imaging moiety, such as a radioisotope (for example, 131I, 112In, 99mTc), a radio-opaque substance, or a material detectable by nuclear magnetic resonance, is introduced (for example, parenterally, subcutaneously, or intraperitoneally) into the mammal. It will be understood in the art that the size of the subject and the imaging system used will determine the quantity of imaging moiety needed to produce diagnostic images. In the case of a radioisotope moiety, for a human subject, the quantity of radioactivity injected will normally range from about 5 to 20 millicuries of 99mTc. The labeled antibody or antibody fragment will then preferentially accumulate at the location of cells which contain the specific protein. In vivo tumor imaging is described in S. W. Burchiel et al., “Immunopharmacokinetics of Radiolabeled Antibodies and Their Fragments.” (Chapter 13 in Tumor Imaging: The Radiochemical Detection of Cancer, S. W. Burchiel and B. A. Rhodes, eds., Masson Publishing Inc. (1982).)

[0547] Thus, the invention provides a diagnostic method of a disorder, which involves (a) assaying the expression of a polypeptide of the present invention in cells or body fluid of an individual; (b) comparing the level of gene expression with a standard gene expression level, whereby an increase or decrease in the assayed polypeptide gene expression level compared to the standard expression level is indicative of a disorder. With respect to cancer, the presence of a relatively high amount of transcript in biopsied tissue from an individual may indicate a predisposition for the development of the disease, or may provide a means for detecting the disease prior to the appearance of actual clinical symptoms. A more definitive diagnosis of this type may allow health professionals to employ preventative measures or aggressive treatment earlier thereby preventing the development or further progression of the cancer.

[0548] Moreover, polypeptides of the present invention can be used to treat, prevent, and/or diagnose disease. For example, patients can be administered a polypeptide of the present invention in an effort to replace absent or decreased levels of the polypeptide (e.g., insulin), to supplement absent or decreased levels of a different polypeptide (e.g., hemoglobin S for hemoglobin B, SOD, catalase, DNA repair proteins), to inhibit the activity of a polypeptide (e.g., an oncogene or tumor supressor), to activate the activity of a polypeptide (e.g., by binding to a receptor), to reduce the activity of a membrane bound receptor by competing with it for free ligand (e.g., soluble TNF receptors used in reducing inflammation), or to bring about a desired response (e.g., blood vessel growth inhibition, enhancement of the immune response to proliferative cells or tissues).

[0549] Similarly, antibodies directed to a polypeptide of the present invention can also be used to treat, prevent, and/or diagnose disease. For example, administration of an antibody directed to a polypeptide of the present invention can bind and reduce overproduction of the polypeptide. Similarly, administration of an antibody can activate the polypeptide, such as by binding to a polypeptide bound to a membrane (receptor).

[0550] At the very least, the polypeptides of the present invention can be used as molecular weight markers on SDS-PAGE gels or on molecular sieve gel filtration columns using methods well known to those of skill in the art. Polypeptides can also be used to raise antibodies, which in turn are used to measure protein expression from a recombinant cell, as a way of assessing transformation of the host cell. Moreover, the polypeptides of the present invention can be used to test the following biological activities.

Gene Therapy Methods

[0551] Another aspect of the present invention is to gene therapy methods for treating or preventing disorders, diseases and conditions. The gene therapy methods relate to the introduction of nucleic acid (DNA, RNA and antisense DNA or RNA) sequences into an animal to achieve expression of a polypeptide of the present invention. This method requires a polynucleotide which codes for a polypeptide of the invention that operatively linked to a promoter and any other genetic elements necessary for the expression of the polypeptide by the target tissue. Such gene therapy and delivery techniques are known in the art, see, for example, WO90/11092, which is herein incorporated by reference.

[0552] Thus, for example, cells from a patient may be engineered with a polynucleotide (DNA or RNA) comprising a promoter operably linked to a polynucleotide of the invention ex vivo, with the engineered cells then being provided to a patient to be treated with the polypeptide. Such methods are well-known in the art. For example, see Belldegrun et al., J. Natl. Cancer Inst., 85:207-216 (1993); Ferrantini et al., Cancer Research, 53:107-1112 (1993); Ferrantini et al., J. Immunology 153: 4604-4615 (1994); Kaido, T., et al., Int. J. Cancer 60: 221-229 (1995); Ogura et al., Cancer Research 50: 5102-5106 (1990); Santodonato, et al., Human Gene Therapy 7:1-10 (1996); Santodonato, et al., Gene Therapy 4:1246-1255 (1997); and Zhang, et al., Cancer Gene Therapy 3: 31-38 (1996)), which are herein incorporated by reference. In one embodiment, the cells which are engineered are arterial cells. The arterial cells may be reintroduced into the patient through direct injection to the artery, the tissues surrounding the artery, or through catheter injection.

[0553] As discussed in more detail below, the polynucleotide constructs can be delivered by any method that delivers injectable materials to the cells of an animal, such as, injection into the interstitial space of tissues (heart, muscle, skin, lung, liver, and the like). The polynucleotide constructs may be delivered in a pharmaceutically acceptable liquid or aqueous carrier.

[0554] In one embodiment, the polynucleotide of the invention is delivered as a naked polynucleotide. The term “naked” polynucleotide, DNA or RNA refers to sequences that are free from any delivery vehicle that acts to assist, promote or facilitate entry into the cell, including viral sequences, viral particles, liposome formulations, lipofectin or precipitating agents and the like. However, the polynucleotides of the invention can also be delivered in liposome formulations and lipofectin formulations and the like can be prepared by methods well known to those skilled in the art. Such methods are described, for example, in U.S. Pat. Nos. 5,593,972, 5,589,466, and 5,580,859, which are herein incorporated by reference.

[0555] The polynucleotide vector constructs of the invention used in the gene therapy method are preferably constructs that will not integrate into the host genome nor will they contain sequences that allow for replication. Appropriate vectors include pWLNEO, pSV2CAT, pOG44, pXT1 and pSG available from Stratagene; pSVK3, pBPV, pMSG and pSVL available from Pharmacia; and pEF 1V5, pcDNA3.1, and pRc/CMV2 available from Invitrogen. Other suitable vectors will be readily apparent to the skilled artisan.

[0556] Any strong promoter known to those skilled in the art can be used for driving the expression of polynucleotide sequence of the invention. Suitable promoters include adenoviral promoters, such as the adenoviral major late promoter; or heterologous promoters, such as the cytomegalovirus (CMV) promoter; the respiratory syncytial virus (RSV) promoter; inducible promoters, such as the MMT promoter, the metallothionein promoter; heat shock promoters; the albumin promoter; the ApoAI promoter; human globin promoters; viral thymidine kinase promoters, such as the Herpes Simplex thymidine kinase promoter; retroviral LTRs; the b-actin promoter; and human growth hormone promoters. The promoter also may be the native promoter for the polynucleotides of the invention.

[0557] Unlike other gene therapy techniques, one major advantage of introducing naked nucleic acid sequences into target cells is the transitory nature of the polynucleotide synthesis in the cells. Studies have shown that non-replicating DNA sequences can be introduced into cells to provide production of the desired polypeptide for periods of up to six months.

[0558] The polynucleotide construct of the invention can be delivered to the interstitial space of tissues within the an animal, including of muscle, skin, brain, lung, liver, spleen, bone marrow, thymus, heart, lymph, blood, bone, cartilage, pancreas, kidney, gall bladder, stomach, intestine, testis, ovary, uterus, rectum, nervous system, eye, gland, and connective tissue. Interstitial space of the tissues comprises the intercellular, fluid, mucopolysaccharide matrix among the reticular fibers of organ tissues, elastic fibers in the walls of vessels or chambers, collagen fibers of fibrous tissues, or that same matrix within connective tissue ensheathing muscle cells or in the lacunae of bone. It is similarly the space occupied by the plasma of the circulation and the lymph fluid of the lymphatic channels. Delivery to the interstitial space of muscle tissue is preferred for the reasons discussed below. They may be conveniently delivered by injection into the tissues comprising these cells. They are preferably delivered to and expressed in persistent, non-dividing cells which are differentiated, although delivery and expression may be achieved in non-differentiated or less completely differentiated cells, such as, for example, stem cells of blood or skin fibroblasts. In vivo muscle cells are particularly competent in their ability to take up and express polynucleotides.

[0559] For the naked nucleic acid sequence injection, an effective dosage amount of DNA or RNA will be in the range of from about 0.05 mg/kg body weight to about 50 mg/kg body weight. Preferably the dosage will be from about 0.005 mg/kg to about 20 mg/kg and more preferably from about 0.05 mg/kg to about 5 mg/kg. Of course, as the artisan of ordinary skill will appreciate, this dosage will vary according to the tissue site of injection. The appropriate and effective dosage of nucleic acid sequence can readily be determined by those of ordinary skill in the art and may depend on the condition being treated and the route of administration.

[0560] The preferred route of administration is by the parenteral route of injection into the interstitial space of tissues. However, other parenteral routes may also be used, such as, inhalation of an aerosol formulation particularly for delivery to lungs or bronchial tissues, throat or mucous membranes of the nose. In addition, naked DNA constructs can be delivered to arteries during angioplasty by the catheter used in the procedure.

[0561] The naked polynucleotides are delivered by any method known in the art, including, but not limited to, direct needle injection at the delivery site, intravenous injection, topical administration, catheter infusion, and so-called “gene guns”. These delivery methods are known in the art.

[0562] The constructs may also be delivered with delivery vehicles such as viral sequences, viral particles, liposome formulations, lipofectin, precipitating agents, etc. Such methods of delivery are known in the art.

[0563] In certain embodiments, the polynucleotide constructs of the invention are complexed in a liposome preparation. Liposomal preparations for use in the instant invention include cationic (positively charged), anionic (negatively charged) and neutral preparations. However, cationic liposomes are particularly preferred because a tight charge complex can be formed between the cationic liposome and the polyanionic nucleic acid. Cationic liposomes have been shown to mediate intracellular delivery of plasmid DNA (Felgner et al., Proc. Natl. Acad. Sci. USA, 84:7413-7416 (1987), which is herein incorporated by reference); mRNA (Malone et al., Proc. Natl. Acad. Sci. USA, 86:6077-6081 (1989), which is herein incorporated by reference); and purified transcription factors (Debs et al., J. Biol. Chem., 265:10189-10192 (1990), which is herein incorporated by reference), in functional form.

[0564] Cationic liposomes are readily available. For example, N[1-2,3-dioleyloxy)propyl]-N,N,N-triethylammonium (DOTMA) liposomes are particularly useful and are available under the trademark Lipofectin, from GIBCO BRL, Grand Island, N.Y. (See, also, Felgner et al., Proc. Natl. Acad. Sci. USA, 84:7413-7416 (1987), which is herein incorporated by reference). Other commercially available liposomes include transfectace (DDAB/DOPE) and DOTAP/DOPE (Boehringer).

[0565] Other cationic liposomes can be prepared from readily available materials using techniques well known in the art. See, e.g. PCT Publication NO: WO 90/11092 (which is herein incorporated by reference) for a description of the synthesis of DOTAP (1,2-bis(oleoyloxy)-3-(trimethylammonio)propane) liposomes. Preparation of DOTMA liposomes is explained in the literature, see, e.g., Felgner et al., Proc. Natl. Acad. Sci. USA, 84:7413-7417, which is herein incorporated by reference. Similar methods can be used to prepare liposomes from other cationic lipid materials.

[0566] Similarly, anionic and neutral liposomes are readily available, such as from Avanti Polar Lipids (Birmingham, Ala.), or can be easily prepared using readily available materials. Such materials include phosphatidyl, choline, cholesterol, phosphatidyl ethanolamine, dioleoylphosphatidyl choline (DOPC), dioleoylphosphatidyl glycerol (DOPG), dioleoylphoshatidyl ethanolamine (DOPE), among others. These materials can also be mixed with the DOTMA and DOTAP starting materials in appropriate ratios. Methods for making liposomes using these materials are well known in the art.

[0567] For example, commercially dioleoylphosphatidyl choline (DOPC), dioleoylphosphatidyl glycerol (DOPG), and dioleoylphosphatidyl ethanolamine (DOPE) can be used in various combinations to make conventional liposomes, with or without the addition of cholesterol. Thus, for example, DOPG/DOPC vesicles can be prepared by drying 50 mg each of DOPG and DOPC under a stream of nitrogen gas into a sonication vial. The sample is placed under a vacuum pump overnight and is hydrated the following day with deionized water. The sample is then sonicated for 2 hours in a capped vial, using a Heat Systems model 350 sonicator equipped with an inverted cup (bath type) probe at the maximum setting while the bath is circulated at 1 SEC. Alternatively, negatively charged vesicles can be prepared without sonication to produce multilamellar vesicles or by extrusion through nucleopore membranes to produce unilamellar vesicles of discrete size. Other methods are known and available to those of skill in the art.

[0568] The liposomes can comprise multilamellar vesicles (MLVs), small unilamellar vesicles (SUVs), or large unilamellar vesicles (LUVs), with SUVs being preferred. The various liposome-nucleic acid complexes are prepared using methods well known in the art. See, e.g., Straubinger et al., Methods of Immunology, 101:512-527 (1983), which is herein incorporated by reference. For example, MLVs containing nucleic acid can be prepared by depositing a thin film of phospholipid on the walls of a glass tube and subsequently hydrating with a solution of the material to be encapsulated. SUVs are prepared by extended sonication of MLVs to produce a homogeneous population of unilamellar liposomes. The material to be entrapped is added to a suspension of preformed MLVs and then sonicated. When using liposomes containing cationic lipids, the dried lipid film is resuspended in an appropriate solution such as sterile water or an isotonic buffer solution such as 10 mM Tris/NaCl, sonicated, and then the preformed liposomes are mixed directly with the DNA. The liposome and DNA form a very stable complex due to binding of the positively charged liposomes to the cationic DNA. SUVs find use with small nucleic acid fragments. LUVs are prepared by a number of methods, well known in the art. Commonly used methods include Ca²⁺-EDTA chelation (Papahadjopoulos et al., Biochim. Biophys. Acta, 394:483 (1975); Wilson et al., Cell, 17:77 (1979)); ether injection (Deamer et al., Biochim. Biophys. Acta, 443:629 (1976); Ostro et al., Biochem. Biophys. Res. Commun., 76:836 (1977); Fraley et al., Proc. Natl. Acad. Sci. USA, 76:3348 (1979)); detergent dialysis (Enoch et al., Proc. Natl. Acad. Sci. USA, 76:145 (1979)); and reverse-phase evaporation (REV) (Fraley et al., J. Biol. Chem., 255:10431 (1980); Szoka et al., Proc. Natl. Acad. Sci. USA, 75:145 (1978); Schaefer-Ridder et al., Science, 215:166 (1982)), which are herein incorporated by reference.

[0569] Generally, the ratio of DNA to liposomes will be from about 10:1 to about 1:10. Preferably, the ration will be from about 5:1 to about 1:5. More preferably, the ration will be about 3:1 to about 1:3. Still more preferably, the ratio will be about 1:1.

[0570] U.S. Pat. No. 5,676,954 (which is herein incorporated by reference) reports on the injection of genetic material, complexed with cationic liposomes carriers, into mice. U.S. Pat. Nos. 4,897,355, 4,946,787, 5,049,386, 5,459,127, 5,589,466, 5,693,622, 5,580,859, 5,703,055, and international publication NO: WO 94/9469 (which are herein incorporated by reference) provide cationic lipids for use in transfecting DNA into cells and mammals. U.S. Pat. Nos. 5,589,466, 5,693,622, 5,580,859, 5,703,055, and international publication NO: WO 94/9469 (which are herein incorporated by reference) provide methods for delivering DNA-cationic lipid complexes to mammals.

[0571] In certain embodiments, cells are engineered, ex vivo or in vivo, using a retroviral particle containing RNA which comprises a sequence encoding polypeptides of the invention. Retroviruses from which the retroviral plasmid vectors may be derived include, but are not limited to, Moloney Murine Leukemia Virus, spleen necrosis virus, Rous sarcoma Virus, Harvey Sarcoma Virus, avian leukosis virus, gibbon ape leukemia virus, human immunodeficiency virus, Myeloproliferative Sarcoma Virus, and mammary tumor virus.

[0572] The retroviral plasmid vector is employed to transduce packaging cell lines to form producer cell lines. Examples of packaging cells which may be transfected include, but are not limited to, the PE501, PA317, R-2, R-AM, PA12, T19-14×, VT-19-17-H2, RCRE, RCRIP, GP+E-86, GP+envAm12, and DAN cell lines as described in Miller, Human Gene Therapy, 1:5-14 (1990), which is incorporated herein by reference in its entirety. The vector may transduce the packaging cells through any means known in the art. Such means include, but are not limited to, electroporation, the use of liposomes, and CaPO₄ precipitation. In one alternative, the retroviral plasmid vector may be encapsulated into a liposome, or coupled to a lipid, and then administered to a host.

[0573] The producer cell line generates infectious retroviral vector particles which include polynucleotide encoding polypeptides of the invention. Such retroviral vector particles then may be employed, to transduce eukaryotic cells, either in vitro or in vivo. The transduced eukaryotic cells will express polypeptides of the invention.

[0574] In certain other embodiments, cells are engineered, ex vivo or in vivo, with polynucleotides of the invention contained in an adenovirus vector. Adenovirus can be manipulated such that it encodes and expresses polypeptides of the invention, and at the same time is inactivated in terms of its ability to replicate in a normal lytic viral life cycle. Adenovirus expression is achieved without integration of the viral DNA into the host cell chromosome, thereby alleviating concerns about insertional mutagenesis. Furthermore, adenoviruses have been used as live enteric vaccines for many years with an excellent safety profile (Schwartzet al., Am. Rev. Respir. Dis., 109:233-238 (1974)). Finally, adenovirus mediated gene transfer has been demonstrated in a number of instances including transfer of alpha-1-antitrypsin and CFTR to the lungs of cotton rats (Rosenfeld et al., Science, 252:431-434 (1991); Rosenfeld et al., Cell, 68:143-155 (1992)). Furthermore, extensive studies to attempt to establish adenovirus as a causative agent in human cancer were uniformly negative (Green et al. Proc. Natl. Acad. Sci. USA, 76:6606 (1979)).

[0575] Suitable adenoviral vectors useful in the present invention are described, for example, in Kozarsky and Wilson, Curr. Opin. Genet. Devel., 3:499-503 (1993); Rosenfeld et al., Cell, 68:143-155 (1992); Engelhardt et al., Human Genet. Ther., 4:759-769 (1993); Yang et al., Nature Genet., 7:362-369 (1994); Wilson et al., Nature, 365:691-692 (1993); and U.S. Pat. No. 5,652,224, which are herein incorporated by reference. For example, the adenovirus vector Ad2 is useful and can be grown in human 293 cells. These cells contain the E1 region of adenovirus and constitutively express E1a and E1b, which complement the defective adenoviruses by providing the products of the genes deleted from the vector. In addition to Ad2, other varieties of adenovirus (e.g., Ad3, Ad5, and Ad7) are also useful in the present invention.

[0576] Preferably, the adenoviruses used in the present invention are replication deficient. Replication deficient adenoviruses require the aid of a helper virus and/or packaging cell line to form infectious particles. The resulting virus is capable of infecting cells and can express a polynucleotide of interest which is operably linked to a promoter, but cannot replicate in most cells. Replication deficient adenoviruses may be deleted in one or more of all or a portion of the following genes: E1a, E1b, E3, E4, E2a, or L1 through L5.

[0577] In certain other embodiments, the cells are engineered, ex vivo or in vivo, using an adeno-associated virus (AAV). AAVs are naturally occurring defective viruses that require helper viruses to produce infectious particles (Muzyczka, Curr. Topics in Microbiol. Immunol., 158:97 (1992)). It is also one of the few viruses that may integrate its DNA into non-dividing cells. Vectors containing as little as 300 base pairs of AAV can be packaged and can integrate, but space for exogenous DNA is limited to about 4.5 kb. Methods for producing and using such AAVs are known in the art. See, for example, U.S. Pat. Nos. 5,139,941, 5,173,414, 5,354,678, 5,436,146, 5,474,935, 5,478,745, and 5,589,377.

[0578] For example, an appropriate AAV vector for use in the present invention will include all the sequences necessary for DNA replication, encapsidation, and host-cell integration. The polynucleotide construct containing polynucleotides of the invention is inserted into the AAV vector using standard cloning methods, such as those found in Sambrook et al., Molecular Cloning: A Laboratory Manual, Cold Spring Harbor Press (1989). The recombinant AAV vector is then transfected into packaging cells which are infected with a helper virus, using any standard technique, including lipofection, electroporation, calcium phosphate precipitation, etc. Appropriate helper viruses include adenoviruses, cytomegaloviruses, vaccinia viruses, or herpes viruses. Once the packaging cells are transfected and infected, they will produce infectious AAV viral particles which contain the polynucleotide construct of the invention. These viral particles are then used to transduce eukaryotic cells, either ex vivo or in vivo. The transduced cells will contain the polynucleotide construct integrated into its genome, and will express the desired gene product.

[0579] Another method of gene therapy involves operably associating heterologous control regions and endogenous polynucleotide sequences (e.g. encoding the polypeptide sequence of interest) via homologous recombination (see, e.g., U.S. Pat. No. 5,641,670, issued Jun. 24, 1997; International Publication NO: WO 96/29411, published Sep. 26, 1996; International Publication NO: WO 94/12650, published Aug. 4, 1994; Koller et al., Proc. Natl. Acad. Sci. USA, 86:8932-8935 (1989); and Zijlstra et al., Nature, 342:435-438 (1989). This method involves the activation of a gene which is present in the target cells, but which is not normally expressed in the cells, or is expressed at a lower level than desired.

[0580] Polynucleotide constructs are made, using standard techniques known in the art, which contain the promoter with targeting sequences flanking the promoter. Suitable promoters are described herein. The targeting sequence is sufficiently complementary to an endogenous sequence to permit homologous recombination of the promoter-targeting sequence with the endogenous sequence. The targeting sequence will be sufficiently near the 5′ end of the desired endogenous polynucleotide sequence so the promoter will be operably linked to the endogenous sequence upon homologous recombination.

[0581] The promoter and the targeting sequences can be amplified using PCR. Preferably, the amplified promoter contains distinct restriction enzyme sites on the 5′ and 3′ ends. Preferably, the 3′ end of the first targeting sequence contains the same restriction enzyme site as the 5′ end of the amplified promoter and the 5′ end of the second targeting sequence contains the same restriction site as the 3′ end of the amplified promoter. The amplified promoter and targeting sequences are digested and ligated together.

[0582] The promoter-targeting sequence construct is delivered to the cells, either as naked polynucleotide, or in conjunction with transfection-facilitating agents, such as liposomes, viral sequences, viral particles, whole viruses, lipofection, precipitating agents, etc., described in more detail above. The P promoter-targeting sequence can be delivered by any method, included direct needle injection, intravenous injection, topical administration, catheter infusion, particle accelerators, etc. The methods are described in more detail below.

[0583] The promoter-targeting sequence construct is taken up by cells. Homologous recombination between the construct and the endogenous sequence takes place, such that an endogenous sequence is placed under the control of the promoter. The promoter then drives the expression of the endogenous sequence.

[0584] The polynucleotides encoding polypeptides of the present invention may be administered along with other polynucleotides encoding other angiongenic proteins. Angiogenic proteins include, but are not limited to, acidic and basic fibroblast growth factors, VEGF-1, VEGF-2 (VEGF-C), VEGF-3 (VEGF-B), epidermal growth factor alpha and beta, platelet-derived endothelial cell growth factor, platelet-derived growth factor, tumor necrosis factor alpha, hepatocyte growth factor, insulin like growth factor, colony stimulating factor, macrophage colony stimulating factor, granulocyte/macrophage colony stimulating factor, and nitric oxide synthase.

[0585] Preferably, the polynucleotide encoding a polypeptide of the invention contains a secretory signal sequence that facilitates secretion of the protein. Typically, the signal sequence is positioned in the coding region of the polynucleotide to be expressed towards or at the 5′ end of the coding region. The signal sequence may be homologous or heterologous to the polynucleotide of interest and may be homologous or heterologous to the cells to be transfected. Additionally, the signal sequence may be chemically synthesized using methods known in the art.

[0586] Any mode of administration of any of the above-described polynucleotides constructs can be used so long as the mode results in the expression of one or more molecules in an amount sufficient to provide a therapeutic effect. This includes direct needle injection, systemic injection, catheter infusion, biolistic injectors, particle accelerators (i.e., “gene guns”), gelfoam sponge depots, other commercially available depot materials, osmotic pumps (e.g., Alza minipumps), oral or suppositorial solid (tablet or pill) pharmaceutical formulations, and decanting or topical applications during surgery. For example, direct injection of naked calcium phosphate-precipitated plasmid into rat liver and rat spleen or a protein-coated plasmid into the portal vein has resulted in gene expression of the foreign gene in the rat livers. (Kaneda et al., Science, 243:375 (1989)).

[0587] A preferred method of local administration is by direct injection. Preferably, a recombinant molecule of the present invention complexed with a delivery vehicle is administered by direct injection into or locally within the area of arteries. Administration of a composition locally within the area of arteries refers to injecting the composition centimeters and preferably, millimeters within arteries.

[0588] Another method of local administration is to contact a polynucleotide construct of the present invention in or around a surgical wound. For example, a patient can undergo surgery and the polynucleotide construct can be coated on the surface of tissue inside the wound or the construct can be injected into areas of tissue inside the wound.

[0589] Therapeutic compositions useful in systemic administration, include recombinant molecules of the present invention complexed to a targeted delivery vehicle of the present invention. Suitable delivery vehicles for use with systemic administration comprise liposomes comprising ligands for targeting the vehicle to a particular site.

[0590] Preferred methods of systemic administration, include intravenous injection, aerosol, oral and percutaneous (topical) delivery. Intravenous injections can be performed using methods standard in the art. Aerosol delivery can also be performed using methods standard in the art (see, for example, Stribling et al., Proc. Natl. Acad. Sci. USA, 189:11277-11281 (1992), which is incorporated herein by reference). Oral delivery can be performed by complexing a polynucleotide construct of the present invention to a carrier capable of withstanding degradation by digestive enzymes in the gut of an animal. Examples of such carriers, include plastic capsules or tablets, such as those known in the art. Topical delivery can be performed by mixing a polynucleotide construct of the present invention with a lipophilic reagent (e.g., DMSO) that is capable of passing into the skin.

[0591] Determining an effective amount of substance to be delivered can depend upon a number of factors including, for example, the chemical structure and biological activity of the substance, the age and weight of the animal, the precise condition requiring treatment and its severity, and the route of administration. The frequency of treatments depends upon a number of factors, such as the amount of polynucleotide constructs administered per dose, as well as the health and history of the subject. The precise amount, number of doses, and timing of doses will be determined by the attending physician or veterinarian. Therapeutic compositions of the present invention can be administered to any animal, preferably to mammals and birds. Preferred mammals include humans, dogs, cats, mice, rats, rabbits sheep, cattle, horses and pigs, with humans being particularly.

Biological Activities

[0592] The polynucleotides or polypeptides, or agonists or antagonists of the present invention can be used in assays to test for one or more biological activities. If these polynucleotides and polypeptides do exhibit activity in a particular assay, it is likely that these molecules may be involved in the diseases associated with the biological activity. Thus, the polynucleotides or polypeptides, or agonists or antagonists could be used to treat the associated disease.

[0593] The present invention encompasses methods of preventing, treating, diagnosing, or ameliorating a disease or disorder. In preferred embodiments, the present invention encompasses a method of treating a disease or disorder listed in the “Preferred Indications” column of Table 1C; comprising administering to a patient in which such treatment, prevention, or amelioration is desired a protein, nucleic acid, or antibody of the invention (or fragment or variant thereof) in an amount effective to treat, prevent, diagnose, or ameliorate the disease or disorder. The first and seccond columns of Table 1C show the “Gene No.” and “cDNA Clone ID No.”, respectively, indicating certain nucleic acids and proteins (or antibodies against the same) of the invention (including polynucleotide, polypeptide, and antibody fragments or variants thereof) that may be used in preventing, treating, diagnosing, or ameliorating the disease(s) or disorder(s) indicated in the corresponding row in Column 3 of Table 1C.

[0594] In another embodiment, the present invention also encompasses methods of preventing, treating, diagnosing, or ameliorating a disease or disorder listed in the “Preferred Indications” column of Table 1C; comprising administering to a patient combinations of the proteins, nucleic acids, or antibodies of the invention (or fragments or variants thereof), sharing similar indications as shown in the corresponding rows in Column 3 of Table 1C.

[0595] The “Preferred Indication” column describes diseases, disorders, and/or conditions that may be treated, prevented, diagnosed, or ameliorated by a protein, nucleic acid, or antibody of the invention (or fragment or variant thereof).

[0596] The recitation of “Cancer” in the “Preferred Indication” column indicates that the corresponding nucleic acid and protein, or antibody against the same, of the invention (or fragment or variant thereof) may be used for example, to diagnose, treat, prevent, and/or ameliorate diseases and/or disorders relating to neoplastic diseases (e.g., leukemias, cancers, and/or as described below under “Hyperproliferative Disorders”).

[0597] In specific embodiments, a protein, nucleic acid, or antibody of the invention (or fragment or variant thereof) having a “Cancer” recitation in the “Preferred Indication” column of Table 1C may be used for example, to diagnose, treat, prevent, and/or ameliorate a neoplasm located in a tissue selected from the group consisting of: colon, abdomen, bone, breast, digestive system, liver, pancreas, prostate, peritoneum, lung, blood (e.g., leukemia), endocrine glands (adrenal, parathyroid, pituitary, testicles, ovary, thymus, thyroid), uterus, eye, head and neck, nervous (central and peripheral), lymphatic system, pelvic, skin, soft tissue, spleen, thoracic, and urogenital.

[0598] In specific embodiments, a protein, nucleic acid, or antibody of the invention (or fragment or variant thereof) having a “Cancer” recitation in the “Preferred Indication” column of Table 1C, may be used for example, to diagnose, treat, prevent, and/or ameliorate a pre-neoplastic condition, selected from the group consisting of: hyperplasia (e.g., endometrial hyperplasia and/or as described in the section entitled “Hyperproliferative Disorders”), metaplasia (e.g., connective tissue metaplasia, atypical metaplasia, and/or as described in the section entitled “Hyperproliferative Disorders”), and/or dysplasia (e.g., cervical dysplasia, and bronchopulmonary dysplasia).

[0599] In another specific embodiment, a protein, nucleic acid, or antibody of the invention (or fragment or variant thereof) having a “Cancer” recitation in the “Preferred Indication” column of Table 1C, may be used for example, to diagnose, treat, prevent, and/or ameliorate a benign dysproliferative disorder selected from the group consisting of: benign tumors, fibrocystic conditions, tissue hypertrophy, and/or as described in the section entitled “Hyperproliferative Disorders”.

[0600] The recitation of “Immune/Hematopoietic” in the “Preferred Indication” column indicates that the corresponding nucleic acid and protein, or antibody against the same, of the invention (or fragment or variant thereof), may be used for example, to diagnose, treat, prevent, and/or ameliorate diseases and/or disorders relating to neoplastic diseases (e.g., as described below under “Hyperproliferative Disorders”), blood disorders (e.g., as described below under “Immune Activity” “Cardiovascular Disorders” and/or “Blood-Related Disorders”), and infections (e.g., as described below under “Infectious Disease”).

[0601] In specific embodiments, a protein, nucleic acid, or antibody of the invention (or fragment or variant thereof) having the “Immune/Hematopoietic” recitation in the “Preferred Indication” column of Table 1C, may be used for example, to diagnose, treat, prevent, and/or ameliorate a disease or disorder selected from the group consisting of: anemia, pancytopenia, leukopenia, thrombocytopenia, leukemias, Hodgkin's disease, non-Hodgkin's lymphoma, acute lymphocytic anemia (ALL), plasmacytomas, multiple myeloma, Burkitt's lymphoma, arthritis, asthma, AIDS, autoimmune disease, rheumatoid arthritis, granulomatous disease, immune deficiency, inflammatory bowel disease, sepsis, neutropenia, neutrophilia, psoriasis, immune reactions to transplanted organs and tissues, systemic lupus erythematosis, hemophilia, hypercoagulation, diabetes mellitus, endocarditis, meningitis, Lyme Disease, and allergies.

[0602] The recitation of “Reproductive” in the “Preferred Indication” column indicates that the corresponding nucleic acid and protein, or antibody against the same, of the invention (or fragment or variant thereof), may be used for example, to diagnose, treat, prevent, and/or ameliorate diseases and/or disorders relating to neoplastic diseases (e.g., as described below under “Hyperproliferative Disorders”), and disorders of the reproductive system (e.g., as described below under “Reproductive System Disorders”).

[0603] In specific embodiments, a protein, nucleic acid, or antibody of the invention (or fragment or variant thereof) having a “Reproductive” recitation in the “Preferred Indication” column of Table 1C, may be used for example, to diagnose, treat, prevent, and/or ameliorate a disease or disorder selected from the group consisting of: cryptorchism, prostatitis, inguinal hernia, varicocele, leydig cell tumors, verrucous carcinoma, prostatitis, malacoplakia, Peyronie's disease, penile carcinoma, squamous cell hyperplasia, dysmenorrhea, ovarian adenocarcinoma, Turner's syndrome, mucopurulent cervicitis, Sertoli-leydig tumors, ovarian cancer, uterine cancer, pelvic inflammatory disease, testicular cancer, prostate cancer, Klinefelter's syndrome, Young's syndrome, premature ejaculation, diabetes mellitus, cystic fibrosis, Kartagener's syndrome, testicular atrophy, testicular feminization, anorchia, ectopic testis, epididymitis, orchitis, gonorrhea, syphilis, testicular torsion, vasitis nodosa, germ cell tumors, stromal tumors, dysmenorrhea, retroverted uterus, endometriosis, fibroids, adenomyosis, anovulatory bleeding, amenorrhea, Cushing's syndrome, hydatidiform moles, Asherman's syndrome, premature menopause, precocious puberty, uterine polyps, dysfunctional uterine bleeding, cervicitis, chronic cervicitis, mucopurulent cervicitis, cervical dysplasia, cervical polyps, Nabothian cysts, cervical erosion, cervical incompetence, cervical neoplasms, pseudohermaphroditism, and premenstrual syndrome.

[0604] The recitation of “Musculoskeletal” in the “Preferred Indication” column indicates that the corresponding nucleic acid and protein, or antibody against the same, of the invention (or fragment or variant thereof), may be used for example, to diagnose, treat, prevent, and/or ameliorate diseases and/or disorders relating to neoplastic diseases (e.g., as described below under “Hyperproliferative Disorders”), and disorders of the immune system (e.g., as described below under “Immune Activity”).

[0605] In specific embodiments, a protein, nucleic acid, or antibody of the invention (or fragment or variant thereof) having a “Musculoskeletal” recitation in the “Preferred Indication” column of Table 1C, may be used for example, to diagnose, treat, prevent, and/or ameliorate a disease or disorder selected from the group consisting of: bone cancers (e.g., osteochondromas, benign chondromas, chondroblastoma, chondromyxoid fibromas, osteoid osteomas, giant cell tumors, multiple myeloma, osteosarcomas), Paget's Disease, rheumatoid arthritis, systemic lupus erythematosus, osteomyelitis, Lyme Disease, gout, bursitis, tendonitis, osteoporosis, osteoarthritis, muscular dystrophy, mitochondrial myopathy, cachexia, and multiple sclerosis.

[0606] The recitation of “Cardiovascular” in the “Preferred Indication” column indicates that the corresponding nucleic acid and protein, or antibody against the same, of the invention (or fragment or variant thereof), may be used for example, to diagnose, treat, prevent, and/or ameliorate diseases and/or disorders relating to neoplastic diseases (e.g., as described below under “Hyperproliferative Disorders”), and disorders of the cardiovascular system (e.g., as described below under “Cardiovascular Disorders”).

[0607] In specific embodiments, a protein, nucleic acid, or antibody of the invention (or fragment or variant thereof) having a “Cardiovascular” recitation in the “Preferred Indication” column of Table 1C, may be used for example, to diagnose, treat, prevent, and/or ameliorate a disease or disorder selected from the group consisting of: myxomas, fibromas, rhabdomyomas, cardiovascular abnormalities (e.g., congenital heart defects, cerebral arteriovenous malformations, septal defects), heart disease (e.g., heart failure, congestive heart disease, arrhythmia, tachycardia, fibrillation, pericardial Disease, endocarditis), cardiac arrest, heart valve disease (e.g., stenosis, regurgitation, prolapse), vascular disease (e.g., hypertension, coronary artery disease, angina, aneurysm, arteriosclerosis, peripheral vascular disease), hyponatremia, hypernatremia, hypokalemia, and hyperkalemia.

[0608] The recitation of “Mixed Fetal” in the “Preferred Indication” column indicates that the corresponding nucleic acid and protein, or antibody against the same, of the invention (or fragment or variant thereof), may be used for example, to diagnose, treat, prevent, and/or ameliorate diseases and/or disorders relating to neoplastic diseases (e.g., as described below under “Hyperproliferative Disorders”).

[0609] In specific embodiments, a protein, nucleic acid, or antibody of the invention (or fragment or variant thereof) having a “Mixed Fetal” recitation in the “Preferred Indication” column of Table 1C, may be used for example, to diagnose, treat, prevent, and/or ameliorate a disease or disorder selected from the group consisting of: spina bifida, hydranencephaly, neurofibromatosis, fetal alcohol syndrome, diabetes mellitus, PKU, Down's syndrome, Patau syndrome, Edwards syndrome, Turner syndrome, Apert syndrome, Carpenter syndrome, Conradi syndrome, Crouzon syndrome, cutis laxa, Cornelia de Lange syndrome, Ellis-van Creveld syndrome, Holt-Oram syndrome, Kartagener syndrome, Meckel-Gruber syndrome, Noonan syndrome, Pallister-Hall syndrome, Rubinstein-Taybi syndrome, Scimitar syndrome, Smith-Lemli-Opitz syndrome, thromocytopenia-absent radius (TAR) syndrome, Treacher Collins syndrome, Williams syndrome, Hirschsprung's disease, Meckel's diverticulum, polycystic kidney disease, Turner's syndrome, and gonadal dysgenesis, Klippel-Feil syndrome, Ostogenesis imperfecta, muscular dystrophy, Tay-Sachs disease, Wilm's tumor, neuroblastoma, and retinoblastoma.

[0610] The recitation of “Excretory” in the “Preferred Indication” column indicates that the corresponding nucleic acid and protein, or antibody against the same, of the invention (or fragment or variant thereof), may be used for example, to diagnose, treat, prevent, and/or ameliorate diseases and/or disorders relating to neoplastic diseases (e.g., as described below under “Hyperproliferative Disorders”) and renal disorders (e.g., as described below under “Renal Disorders”).

[0611] In specific embodiments, a protein, nucleic acid, or antibody of the invention (or fragment or variant thereof) having a “Excretory” recitation in the “Preferred Indication” column of Table 1C, may be used for example, to diagnose, treat, prevent, and/or ameliorate a disease or disorder selected from the group consisting of: bladder cancer, prostate cancer, benign prostatic hyperplasia, bladder disorders (e.g., urinary incontinence, urinary retention, urinary obstruction, urinary tract Infections, interstitial cystitis, prostatitis, neurogenic bladder, hematuria), renal disorders (e.g., hydronephrosis, proteinuria, renal failure, pyelonephritis, urolithiasis, reflux nephropathy, and unilateral obstructive uropathy).

[0612] The recitation of “Neural/Sensory” in the “Preferred Indication” column indicates that the corresponding nucleic acid and protein, or antibody against the same, of the invention (or fragment or variant thereof), may be used for example, to diagnose, treat, prevent, and/or ameliorate diseases and/or disorders relating to neoplastic diseases (e.g., as described below under “Hyperproliferative Disorders”) and diseases or disorders of the nervous system (e.g., as described below under “Neural Activity and Neurological Diseases”).

[0613] In specific embodiments, a protein, nucleic acid, or antibody of the invention (or fragment or variant thereof) having a “Neural/Sensory” recitation in the “Preferred Indication” column of Table 1C, may be used for example, to diagnose, treat, prevent, and/or ameliorate a disease or disorder selected from the group consisting of: brain cancer (e.g., brain stem glioma, brain tumors, central nervous system (Primary) lymphoma, central nervous system lymphoma, cerebellar astrocytoma, and cerebral astrocytoma, neurodegenerative disorders (e.g., Alzheimer's Disease, Creutzfeldt-Jakob Disease, Parkinson's Disease, and Idiopathic Presenile Dementia), encephalomyelitis, cerebral malaria, meningitis, metabolic brain diseases (e.g., phenylketonuria and pyruvate carboxylase deficiency), cerebellar ataxia, ataxia telangiectasia, and AIDS Dementia Complex, schizophrenia, attention deficit disorder, hyperactive attention deficit disorder, autism, and obsessive compulsive disorders.

[0614] The recitation of “Respiratory” in the “Preferred Indication” column indicates that the corresponding nucleic acid and protein, or antibody against the same, of the invention (or fragment or variant thereof), may be used for example, to diagnose, treat, prevent, and/or ameliorate diseases and/or disorders relating to neoplastic diseases (e.g., as described below under “Hyperproliferative Disorders”) and diseases or disorders of the respiratory system (e.g., as described below under “Respiratory Disorders”).

[0615] In specific embodiments, a protein, nucleic acid, or antibody of the invention (or fragment or variant thereof) having a “Respiratory” recitation in the “Preferred Indication” column of Table 1C, may be used for example, to diagnose, treat, prevent, and/or ameliorate a disease or disorder selected from the group consisting of: cancers of the respiratory system such as larynx cancer, pharynx cancer, trachea cancer, epiglottis cancer, lung cancer, squamous cell carcinomas, small cell (oat cell) carcinomas, large cell carcinomas, and adenocarcinomas. Allergic reactions, cystic fibrosis, sarcoidosis, histiocytosis X, infiltrative lung diseases (e.g., pulmonary fibrosis and lymphoid interstitial pneumonia), obstructive airway diseases (e.g., asthma, emphysema, chronic or acute bronchitis), occupational lung diseases (e.g., silicosis and asbestosis), pneumonia, and pleurisy.

[0616] The recitation of “Endocrine” in the “Preferred Indication” column indicates that the corresponding nucleic acid and protein, or antibody against the same, of the invention (or fragment or variant thereof), may be used for example, to diagnose, treat, prevent, and/or ameliorate diseases and/or disorders relating to neoplastic diseases (e.g., as described below under “Hyperproliferative Disorders”) and diseases or disorders of the respiratory system (e.g., as described below under “Respiratory Disorders”), renal disorders (e.g., as described below under “Renal Disorders”), and disorders of the endocrine system (e.g., as described below under “Endocrine Disorders”.

[0617] In specific embodiments, a protein, nucleic acid, or antibody of the invention (or fragment or variant thereof) having an “Endocrine” recitation in the “Preferred Indication” column of Table 1C, may be used for example, to diagnose, treat, prevent, and/or ameliorate a disease or disorder selected from the group consisting of: cancers of endocrine tissues and organs (e.g., cancers of the hypothalamus, pituitary gland, thyroid gland, parathyroid glands, pancreas, adrenal glands, ovaries, and testes), diabetes (e.g., diabetes insipidus, type I and type II diabetes mellitus), obesity, disorders related to pituitary glands (e.g., hyperpituitarism, hypopituitarism, and pituitary dwarfism), hypothyroidism, hyperthyroidism, goiter, reproductive disorders (e.g. male and female infertility), disorders related to adrenal glands (e.g., Addison's Disease, corticosteroid deficiency, and Cushing's Syndrome), kidney cancer (e.g., hypernephroma, transitional cell cancer, and Wilm's tumor), diabetic nephropathy, interstitial nephritis, polycystic kidney disease, glomerulonephritis (e.g., IgM mesangial proliferative glomerulonephritis and glomerulonephritis caused by autoimmune disorders; such as Goodpasture's syndrome), and nephrocalcinosis.

[0618] The recitation of “Digestive” in the “Preferred Indication” column indicates that the corresponding nucleic acid and protein, or antibody against the same, of the invention (or fragment or variant thereof), may be used for example, to diagnose, treat, prevent, and/or ameliorate diseases and/or disorders relating to neoplastic diseases (e.g., as described below under “Hyperproliferative Disorders”) and diseases or disorders of the gastrointestinal system (e.g., as described below under “Gastrointestinal Disorders”.

[0619] In specific embodiments, a protein, nucleic acid, or antibody of the invention (or fragment or variant thereof) having a “Digestive” recitation in the “Preferred Indication” column of Table 1C, may be used for example, to diagnose, treat, prevent, and/or ameliorate a disease or disorder selected from the group consisting of: ulcerative colitis, appendicitis, Crohn's disease, hepatitis, hepatic encephalopathy, portal hypertension, cholelithiasis, cancer of the digestive system (e.g., biliary tract cancer, stomach cancer, colon cancer, gastric cancer, pancreatic cancer, cancer of the bile duct, tumors of the colon (e.g., polyps or cancers), and cirrhosis), pancreatitis, ulcerative disease, pyloric stenosis, gastroenteritis, gastritis, gastric atropy, benign tumors of the duodenum, distension, irritable bowel syndrome, malabsorption, congenital disorders of the small intestine, bacterial and parasitic infection, megacolon, Hirschsprung's disease, aganglionic megacolon, acquired megacolon, colitis, anorectal disorders (e.g., anal fistulas, hemorrhoids), congenital disorders of the liver (e.g., Wilson's disease, hemochromatosis, cystic fibrosis, biliary atresia, and alpha1-antitrypsin deficiency), portal hypertension, cholelithiasis, and jaundice.

[0620] The recitation of “Connective/Epithelial” in the “Preferred Indication” column indicates that the corresponding nucleic acid and protein, or antibody against the same, of the invention (or fragment or variant thereof), may be used for example, to diagnose, treat, prevent, and/or ameliorate diseases and/or disorders relating to neoplastic diseases (e.g., as described below under “Hyperproliferative Disorders”), cellular and genetic abnormalities (e.g., as described below under “Diseases at the Cellular Level”), angiogenesis (e.g., as described below under “Anti-Angiogenesis Activity”), and or to promote or inhibit regeneration (e.g., as described below under “Regeneration”), and wound healing (e.g., as described below under “Wound Healing and Epithelial Cell Proliferation”).

[0621] In specific embodiments, a protein, nucleic acid, or antibody of the invention (or fragment or variant thereof) having a “Connective/Epithelial” recitation in the “Preferred Indication” column of Table 1C, may be used for example, to diagnose, treat, prevent, and/or ameliorate a disease or disorder selected from the group consisting of: connective tissue metaplasia, mixed connective tissue disease, focal epithelial hyperplasia, epithelial metaplasia, mucoepithelial dysplasia, graft v. host disease, polymyositis, cystic hyperplasia, cerebral dysplasia, tissue hypertrophy, Alzheimer's disease, lymphoproliferative disorder, Waldenstron's macroglobulinemia, Crohn's disease, pernicious anemia, idiopathic Addison's disease, glomerulonephritis, bullous pemphigoid, Sjogren's syndrome, diabetes mellitus, cystic fibrosis, osteoblastoma, osteoclastoma, osteosarcoma, chondrosarcoma, osteoporosis, osteocarthritis, periodontal disease, wound healing, relapsing polychondritis, vasculitis, polyarteritis nodosa, Wegener's granulomatosis, cellulitis, rheumatoid arthritis, psoriatic arthritis, discoid lupus erythematosus, systemic lupus erythematosus, scleroderma, CREST syndrome, Sjogren's syndrome, polymyositis, dermatomyositis, mixed connective tissue disease, relapsing polychondritis, vasculitis, Henoch-Schonlein syndrome, erythema nodosum, polyarteritis nodosa, temporal (giant cell) arteritis, Takayasu's arteritis, Wegener's granulomatosis, Reiter's syndrome, Behcet's syndrome, ankylosing spondylitis, cellulitis, keloids, Ehler Danlos syndrome, Marfan syndrome, pseudoxantoma elasticum, osteogenese imperfecta, chondrodysplasias, epidermolysis bullosa, Alport syndrome, and cutis laxa.

[0622] Moreover, polynucleotides, translation products and antibodies corresponding to this gene may be useful for the diagnosis, prognosis, prevention, and/or treatment of diseases and/or disorders associated with the following systems.

Immune Activity

[0623] Polynucleotides, polypeptides, antibodies, and/or agonists or antagonists of the present invention may be useful in treating, preventing, diagnosing and/or prognosing diseases, disorders, and/or conditions of the immune system, by, for example, activating or inhibiting the proliferation, differentiation, or mobilization (chemotaxis) of immune cells. Immune cells develop through a process called hematopoiesis, producing myeloid (platelets, red blood cells, neutrophils, and macrophages) and lymphoid (B and T lymphocytes) cells from pluripotent stem cells. The etiology of these immune diseases, disorders, and/or conditions may be genetic, somatic, such as cancer and some autoimmune diseases, acquired (e.g., by chemotherapy or toxins), or infectious. Moreover, polynucleotides, polypeptides, antibodies, and/or agonists or antagonists of the present invention can be used as a marker or detector of a particular immune system disease or disorder.

[0624] In another embodiment, a polypeptide of the invention, or polynucleotides, antibodies, agonists, or antagonists corresponding to that polypeptide, may be used to treat diseases and disorders of the immune system and/or to inhibit or enhance an immune response generated by cells associated with the tissue(s) in which the polypeptide of the invention is expressed, including one, two, three, four, five, or more tissues disclosed in Table 1B, column 8 (Tissue Distribution Library Code).

[0625] Polynucleotides, polypeptides, antibodies, and/or agonists or antagonists of the present invention may be useful in treating, preventing, diagnosing, and/or prognosing immunodeficiencies, including both congenital and acquired immunodeficiencies. Examples of B cell immunodeficiencies in which immunoglobulin levels B cell function and/or B cell numbers are decreased include: X-linked agammaglobulinemia (Bruton's disease), X-linked infantile agammaglobulinemia, X-linked immunodeficiency with hyper IgM, non X-linked immunodeficiency with hyper IgM, X-linked lymphoproliferative syndrome (XLP), agammaglobulinemia including congenital and acquired agammaglobulinemia, adult onset agammaglobulinemia, late-onset agammaglobulinemia, dysgammaglobulinemia, hypogammaglobulinemia, unspecified hypogammaglobulinemia, recessive agammaglobulinemia (Swiss type), Selective IgM deficiency, selective IgA deficiency, selective IgG subclass deficiencies, IgG subclass deficiency (with or without IgA deficiency), Ig deficiency with increased IgM, IgG and IgA deficiency with increased IgM, antibody deficiency with normal or elevated Igs, Ig heavy chain deletions, kappa chain deficiency, B cell lymphoproliferative disorder (BLPD), common variable immunodeficiency (CVID), common variable immunodeficiency (CVI) (acquired), and transient hypogammaglobulinemia of infancy.

[0626] In specific embodiments, ataxia-telangiectasia or conditions associated with ataxia-telangiectasia are treated, prevented, diagnosed, and/or prognosing using the polypeptides or polynucleotides of the invention, and/or agonists or antagonists thereof.

[0627] Examples of congenital immunodeficiencies in which T cell and/or B cell function and/or number is decreased include, but are not limited to: DiGeorge anomaly, severe combined immunodeficiencies (SCID) (including, but not limited to, X-linked SCID, autosomal recessive SCID, adenosine deaminase deficiency, purine nucleoside phosphorylase (PNP) deficiency, Class II MHC deficiency (Bare lymphocyte syndrome), Wiskott-Aldrich syndrome, and ataxia telangiectasia), thymic hypoplasia, third and fourth pharyngeal pouch syndrome, 22q11.2 deletion, chronic mucocutaneous candidiasis, natural killer cell deficiency (NK), idiopathic CD4+ T-lymphocytopenia, immunodeficiency with predominant T cell defect (unspecified), and unspecified immunodeficiency of cell mediated immunity.

[0628] In specific embodiments, DiGeorge anomaly or conditions associated with DiGeorge anomaly are treated, prevented, diagnosed, and/or prognosed using polypeptides or polynucleotides of the invention, or antagonists or agonists thereof.

[0629] Other immunodeficiencies that may be treated, prevented, diagnosed, and/or prognosed using polypeptides or polynucleotides of the invention, and/or agonists or antagonists thereof, include, but are not limited to, chronic granulomatous disease, Chediak-Higashi syndrome, myeloperoxidase deficiency, leukocyte glucose-6-phosphate dehydrogenase deficiency, X-linked lymphoproliferative syndrome (XLP), leukocyte adhesion deficiency, complement component deficiencies (including C1, C2, C3, C4, C5, C6, C7, C8 and/or C9 deficiencies), reticular dysgenesis, thymic alymphoplasia-aplasia, immunodeficiency with thymoma, severe congenital leukopenia, dysplasia with immunodeficiency, neonatal neutropenia, short limbed dwarfism, and Nezelof syndrome-combined immunodeficiency with Igs.

[0630] In a preferred embodiment, the immunodeficiencies and/or conditions associated with the immunodeficiencies recited above are treated, prevented, diagnosed and/or prognosed using polynucleotides, polypeptides, antibodies, and/or agonists or antagonists of the present invention.

[0631] In a preferred embodiment polynucleotides, polypeptides, antibodies, and/or agonists or antagonists of the present invention could be used as an agent to boost immunoresponsiveness among immunodeficient individuals. In specific embodiments, polynucleotides, polypeptides, antibodies, and/or agonists or antagonists of the present invention could be used as an agent to boost immunoresponsiveness among B cell and/or T cell immunodeficient individuals.

[0632] The polynucleotides, polypeptides, antibodies, and/or agonists or antagonists of the present invention may be useful in treating, preventing, diagnosing and/or prognosing autoimmune disorders. Many autoimmune disorders result from inappropriate recognition of self as foreign material by immune cells. This inappropriate recognition results in an immune response leading to the destruction of the host tissue. Therefore, the administration of polynucleotides and polypeptides of the invention that can inhibit an immune response, particularly the proliferation, differentiation, or chemotaxis of T-cells, may be an effective therapy in preventing autoimmune disorders.

[0633] Autoimmune diseases or disorders that may be treated, prevented, diagnosed and/or prognosed by polynucleotides, polypeptides, antibodies, and/or agonists or antagonists of the present invention include, but are not limited to, one or more of the following: systemic lupus erythematosus, rheumatoid arthritis, ankylosing spondylitis, multiple sclerosis, autoimmune thyroiditis, Hashimoto's thyroiditis, autoimmune hemolytic anemia, hemolytic anemia, thrombocytopenia, autoimmune thrombocytopenia purpura, autoimmune neonatal thrombocytopenia, idiopathic thrombocytopenia purpura, purpura (e.g., Henloch-Scoenlein purpura), autoimmunocytopenia, Goodpasture's syndrome, Pemphigus vulgaris, myasthenia gravis, Grave's disease (hyperthyroidism), and insulin-resistant diabetes mellitus.

[0634] Additional disorders that are likely to have an autoimmune component that may be treated, prevented, and/or diagnosed with the compositions of the invention include, but are not limited to, type II collagen-induced arthritis, antiphospholipid syndrome, dermatitis, allergic encephalomyelitis, myocarditis, relapsing polychondritis, rheumatic heart disease, neuritis, uveitis ophthalmia, polyendocrinopathies, Reiter's Disease, Stiff-Man Syndrome, autoimmune pulmonary inflammation, autism, Guillain-Barre Syndrome, insulin dependent diabetes mellitus, and autoimmune inflammatory eye disorders.

[0635] Additional disorders that are likely to have an autoimmune component that may be treated, prevented, diagnosed and/or prognosed with the compositions of the invention include, but are not limited to, scleroderma with anti-collagen antibodies (often characterized, e.g., by nucleolar and other nuclear antibodies), mixed connective tissue disease (often characterized, e.g., by antibodies to extractable nuclear antigens (e.g., ribonucleoprotein)), polymyositis (often characterized, e.g., by nonhistone ANA), pernicious anemia (often characterized, e.g., by antiparietal cell, microsomes, and intrinsic factor antibodies), idiopathic Addison's disease (often characterized, e.g., by humoral and cell-mediated adrenal cytotoxicity, infertility (often characterized, e.g., by antispermatozoal antibodies), glomerulonephritis (often characterized, e.g., by glomerular basement membrane antibodies or immune complexes), bullous pemphigoid (often characterized, e.g., by IgG and complement in basement membrane), Sjogren's syndrome (often characterized, e.g., by multiple tissue antibodies, and/or a specific nonhistone ANA (SS-B)), diabetes mellitus (often characterized, e.g., by cell-mediated and humoral islet cell antibodies), and adrenergic drug resistance (including adrenergic drug resistance with asthma or cystic fibrosis) (often characterized, e.g., by beta-adrenergic receptor antibodies).

[0636] Additional disorders that may have an autoimmune component that may be treated, prevented, diagnosed and/or prognosed with the compositions of the invention include, but are not limited to, chronic active hepatitis (often characterized, e.g., by smooth muscle antibodies), primary biliary cirrhosis (often characterized, e.g., by mitochondria antibodies), other endocrine gland failure (often characterized, e.g., by specific tissue antibodies in some cases), vitiligo (often characterized, e.g., by melanocyte antibodies), vasculitis (often characterized, e.g., by Ig and complement in vessel walls and/or low serum complement), post-MI (often characterized, e.g., by myocardial antibodies), cardiotomy syndrome (often characterized, e.g., by myocardial antibodies), urticaria (often characterized, e.g., by IgG and IgM antibodies to IgE), atopic dermatitis (often characterized, e.g., by IgG and IgM antibodies to IgE), asthma (often characterized, e.g., by IgG and IgM antibodies to IgE), and many other inflammatory, granulomatous, degenerative, and atrophic disorders.

[0637] In a preferred embodiment, the autoimmune diseases and disorders and/or conditions associated with the diseases and disorders recited above are treated, prevented, diagnosed and/or prognosed using for example, antagonists or agonists, polypeptides or polynucleotides, or antibodies of the present invention. In a specific preferred embodiment, rheumatoid arthritis is treated, prevented, and/or diagnosed using polynucleotides, polypeptides, antibodies, and/or agonists or antagonists of the present invention.

[0638] In another specific preferred embodiment, systemic lupus erythematosus is treated, prevented, and/or diagnosed using polynucleotides, polypeptides, antibodies, and/or agonists or antagonists of the present invention. In another specific preferred embodiment, idiopathic thrombocytopenia purpura is treated, prevented, and/or diagnosed using polynucleotides, polypeptides, antibodies, and/or agonists or antagonists of the present invention.

[0639] In another specific preferred embodiment IgA nephropathy is treated, prevented, and/or diagnosed using polynucleotides, polypeptides, antibodies, and/or agonists or antagonists of the present invention.

[0640] In a preferred embodiment, the autoimmune diseases and disorders and/or conditions associated with the diseases and disorders recited above are treated, prevented, diagnosed and/or prognosed using polynucleotides, polypeptides, antibodies, and/or agonists or antagonists of the present invention In preferred embodiments, polypeptides, antibodies, polynucleotides and/or agonists or antagonists of the present invention are used as a immunosuppressive agent(s).

[0641] Polynucleotides, polypeptides, antibodies, and/or agonists or antagonists of the present invention may be useful in treating, preventing, prognosing, and/or diagnosing diseases, disorders, and/or conditions of hematopoietic cells. Polynucleotides, polypeptides, antibodies, and/or agonists or antagonists of the present invention could be used to increase differentiation and proliferation of hematopoietic cells, including the pluripotent stem cells, in an effort to treat or prevent those diseases, disorders, and/or conditions associated with a decrease in certain (or many) types hematopoietic cells, including but not limited to, leukopenia, neutropenia, anemia, and thrombocytopenia. Alternatively, Polynucleotides, polypeptides, antibodies, and/or agonists or antagonists of the present invention could be used to increase differentiation and proliferation of hematopoietic cells, including the pluripotent stem cells, in an effort to treat or prevent those diseases, disorders, and/or conditions associated with an increase in certain (or many) types of hematopoietic cells, including but not limited to, histiocytosis.

[0642] Allergic reactions and conditions, such as asthma (particularly allergic asthma) or other respiratory problems, may also be treated, prevented, diagnosed and/or prognosed using polypeptides, antibodies, or polynucleotides of the invention, and/or agonists or antagonists thereof. Moreover, these molecules can be used to treat, prevent, prognose, and/or diagnose anaphylaxis, hypersensitivity to an antigenic molecule, or blood group incompatibility.

[0643] Additionally, polypeptides or polynucleotides of the invention, and/or agonists or antagonists thereof, may be used to treat, prevent, diagnose and/or prognose IgE-mediated allergic reactions. Such allergic reactions include, but are not limited to, asthma, rhinitis, and eczema. In specific embodiments, polynucleotides, polypeptides, antibodies, and/or agonists or antagonists of the present invention may be used to modulate IgE concentrations in vitro or in vivo.

[0644] Moreover, polynucleotides, polypeptides, antibodies, and/or agonists or antagonists of the present invention have uses in the diagnosis, prognosis, prevention, and/or treatment of inflammatory conditions. For example, since polypeptides, antibodies, or polynucleotides of the invention, and/or agonists or antagonists of the invention may inhibit the activation, proliferation and/or differentiation of cells involved in an inflammatory response, these molecules can be used to prevent and/or treat chronic and acute inflammatory conditions. Such inflammatory conditions include, but are not limited to, for example, inflammation associated with infection (e.g., septic shock, sepsis, or systemic inflammatory response syndrome), ischemia-reperfusion injury, endotoxin lethality, complement-mediated hyperacute rejection, nephritis, cytokine or chemokine induced lung injury, inflammatory bowel disease, Crohn's disease, over production of cytokines (e.g., TNF or IL-1.), respiratory disorders (e.g., asthma and allergy); gastrointestinal disorders (e.g., inflammatory bowel disease); cancers (e.g., gastric, ovarian, lung, bladder, liver, and breast); CNS disorders (e.g., multiple sclerosis; ischemic brain injury and/or stroke, traumatic brain injury, neurodegenerative disorders (e.g., Parkinson's disease and Alzheimer's disease); AIDS-related dementia; and prion disease); cardiovascular disorders (e.g., atherosclerosis, myocarditis, cardiovascular disease, and cardiopulmonary bypass complications); as well as many additional diseases, conditions, and disorders that are characterized by inflammation (e.g., hepatitis, rheumatoid arthritis, gout, trauma, pancreatitis, sarcoidosis, dermatitis, renal ischemia-reperfusion injury, Grave's disease, systemic lupus erythematosus, diabetes mellitus, and allogenic transplant rejection).

[0645] Because inflammation is a fundamental defense mechanism, inflammatory disorders can effect virtually any tissue of the body. Accordingly, polynucleotides, polypeptides, and antibodies of the invention, as well as agonists or antagonists thereof, have uses in the treatment of tissue-specific inflammatory disorders, including, but not limited to, adrenalitis, alveolitis, angiocholecystitis, appendicitis, balanitis, blepharitis, bronchitis, bursitis, carditis, cellulitis, cervicitis, cholecystitis, chorditis, cochlitis, colitis, conjunctivitis, cystitis, dermatitis, diverticulitis, encephalitis, endocarditis, esophagitis, eustachitis, fibrositis, folliculitis, gastritis, gastroenteritis, gingivitis, glossitis, hepatosplenitis, keratitis, labyrinthitis, laryngitis, lymphangitis, mastitis, media otitis, meningitis, metritis, mucitis, myocarditis, myosititis, myringitis, nephritis, neuritis, orchitis, osteochondritis, otitis, pericarditis, peritendonitis, peritonitis, pharyngitis, phlebitis, poliomyelitis, prostatitis, pulpitis, retinitis, rhinitis, salpingitis, scleritis, sclerochoroiditis, scrotitis, sinusitis, spondylitis, steatitis, stomatitis, synovitis, syringitis, tendonitis, tonsillitis, urethritis, and vaginitis.

[0646] In specific embodiments, polypeptides, antibodies, or polynucleotides of the invention, and/or agonists or antagonists thereof, are useful to diagnose, prognose, prevent, and/or treat organ transplant rejections and graft-versus-host disease. Organ rejection occurs by host immune cell destruction of the transplanted tissue through an immune response. Similarly, an immune response is also involved in GVHD, but, in this case, the foreign transplanted immune cells destroy the host tissues. Polypeptides, antibodies, or polynucleotides of the invention, and/or agonists or antagonists thereof, that inhibit an immune response, particularly the activation, proliferation, differentiation, or chemotaxis of T-cells, may be an effective therapy in preventing organ rejection or GVHD. In specific embodiments, polypeptides, antibodies, or polynucleotides of the invention, and/or agonists or antagonists thereof, that inhibit an immune response, particularly the activation, proliferation, differentiation, or chemotaxis of T-cells, may be an effective therapy in preventing experimental allergic and hyperacute xenograft rejection.

[0647] In other embodiments, polypeptides, antibodies, or polynucleotides of the invention, and/or agonists or antagonists thereof, are useful to diagnose, prognose, prevent, and/or treat immune complex diseases, including, but not limited to, serum sickness, post streptococcal glomerulonephritis, polyarteritis nodosa, and immune complex-induced vasculitis.

[0648] Polypeptides, antibodies, polynucleotides and/or agonists or antagonists of the invention can be used to treat, detect, and/or prevent infectious agents. For example, by increasing the immune response, particularly increasing the proliferation activation and/or differentiation of B and/or T cells, infectious diseases may be treated, detected, and/or prevented. The immune response may be increased by either enhancing an existing immune response, or by initiating a new immune response. Alternatively, polynucleotides, polypeptides, antibodies, and/or agonists or antagonists of the present invention may also directly inhibit the infectious agent (refer to section of application listing infectious agents, etc), without necessarily eliciting an immune response.

[0649] In another embodiment, polypeptides, antibodies, polynucleotides and/or agonists or antagonists of the present invention are used as a vaccine adjuvant that enhances immune responsiveness to an antigen. In a specific embodiment, polypeptides, antibodies, polynucleotides and/or agonists or antagonists of the present invention are used as an adjuvant to enhance tumor-specific immune responses.

[0650] In another specific embodiment, polypeptides, antibodies, polynucleotides and/or agonists or antagonists of the present invention are used as an adjuvant to enhance anti-viral immune responses. Anti-viral immune responses that may be enhanced using the compositions of the invention as an adjuvant, include virus and virus associated diseases or symptoms described herein or otherwise known in the art. In specific embodiments, the compositions of the invention are used as an adjuvant to enhance an immune response to a virus, disease, or symptom selected from the group consisting of: AIDS, meningitis, Dengue, EBV, and hepatitis (e.g., hepatitis B). In another specific embodiment, the compositions of the invention are used as an adjuvant to enhance an immune response to a virus, disease, or symptom selected from the group consisting of: HIV/AIDS, respiratory syncytial virus, Dengue, rotavirus, Japanese B encephalitis, influenza A and B, parainfluenza, measles, cytomegalovirus, rabies, Junin, Chikungunya, Rift Valley Fever, herpes simplex, and yellow fever.

[0651] In another specific embodiment, polypeptides, antibodies, polynucleotides and/or agonists or antagonists of the present invention are used as an adjuvant to enhance anti-bacterial or anti-fungal immune responses. Anti-bacterial or anti-fungal immune responses that may be enhanced using the compositions of the invention as an adjuvant, include bacteria or fungus and bacteria or fungus associated diseases or symptoms described herein or otherwise known in the art. In specific embodiments, the compositions of the invention are used as an adjuvant to enhance an immune response to a bacteria or fungus, disease, or symptom selected from the group consisting of: tetanus, Diphtheria, botulism, and meningitis type B.

[0652] In another specific embodiment, the compositions of the invention are used as an adjuvant to enhance an immune response to a bacteria or fungus, disease, or symptom selected from the group consisting of: Vibrio cholerae, Mycobacterium leprae, Salmonella typhi, Salmonella paratyphi, Meisseria meningitidis, Streptococcus pneumoniae, Group B streptococcus, Shigella spp., Enterotoxigenic Escherichia coli, Enterohemorrhagic E. coli, and Borrelia burgdorferi.

[0653] In another specific embodiment, polypeptides, antibodies, polynucleotides and/or agonists or antagonists of the present invention are used as an adjuvant to enhance anti-parasitic immune responses. Anti-parasitic immune responses that may be enhanced using the compositions of the invention as an adjuvant, include parasite and parasite associated diseases or symptoms described herein or otherwise known in the art. In specific embodiments, the compositions of the invention are used as an adjuvant to enhance an immune response to a parasite. In another specific embodiment, the compositions of the invention are used as an adjuvant to enhance an immune response to Plasmodium (malaria) or Leishmania.

[0654] In another specific embodiment, polypeptides, antibodies, polynucleotides and/or agonists or antagonists of the present invention may also be employed to treat infectious diseases including silicosis, sarcoidosis, and idiopathic pulmonary fibrosis; for example, by preventing the recruitment and activation of mononuclear phagocytes.

[0655] In another specific embodiment, polypeptides, antibodies, polynucleotides and/or agonists or antagonists of the present invention are used as an antigen for the generation of antibodies to inhibit or enhance immune mediated responses against polypeptides of the invention.

[0656] In one embodiment, polypeptides, antibodies, polynucleotides and/or agonists or antagonists of the present invention are administered to an animal (e.g., mouse, rat, rabbit, hamster, guinea pig, pigs, micro-pig, chicken, camel, goat, horse, cow, sheep, dog, cat, non-human primate, and human, most preferably human) to boost the immune system to produce increased quantities of one or more antibodies (e.g., IgG, IgA, IgM, and IgE), to induce higher affinity antibody production and immunoglobulin class switching (e.g., IgG, IgA, IgM, and IgE), and/or to increase an immune response.

[0657] In another specific embodiment, polypeptides, antibodies, polynucleotides and/or agonists or antagonists of the present invention are used as a stimulator of B cell responsiveness to pathogens.

[0658] In another specific embodiment, polypeptides, antibodies, polynucleotides and/or agonists or antagonists of the present invention are used as an activator of T cells.

[0659] In another specific embodiment, polypeptides, antibodies, polynucleotides and/or agonists or antagonists of the present invention are used as an agent that elevates the immune status of an individual prior to their receipt of immunosuppressive therapies.

[0660] In another specific embodiment, polypeptides, antibodies, polynucleotides and/or agonists or antagonists of the present invention are used as an agent to induce higher affinity antibodies.

[0661] In another specific embodiment, polypeptides, antibodies, polynucleotides and/or agonists or antagonists of the present invention are used as an agent to increase serum immunoglobulin concentrations.

[0662] In another specific embodiment, polypeptides, antibodies, polynucleotides and/or agonists or antagonists of the present invention are used as an agent to accelerate recovery of immunocompromised individuals.

[0663] In another specific embodiment, polypeptides, antibodies, polynucleotides and/or agonists or antagonists of the present invention are used as an agent to boost immunoresponsiveness among aged populations and/or neonates.

[0664] In another specific embodiment, polypeptides, antibodies, polynucleotides and/or agonists or antagonists of the present invention are used as an immune system enhancer prior to, during, or after bone marrow transplant and/or other transplants (e.g., allogeneic or xenogeneic organ transplantation). With respect to transplantation, compositions of the invention may be administered prior to, concomitant with, and/or after transplantation. In a specific embodiment, compositions of the invention are administered after transplantation, prior to the beginning of recovery of T-cell populations. In another specific embodiment, compositions of the invention are first administered after transplantation after the beginning of recovery of T cell populations, but prior to full recovery of B cell populations.

[0665] In another specific embodiment, polypeptides, antibodies, polynucleotides and/or agonists or antagonists of the present invention are used as an agent to boost immunoresponsiveness among individuals having an acquired loss of B cell function. Conditions resulting in an acquired loss of B cell function that may be ameliorated or treated by administering the polypeptides, antibodies, polynucleotides and/or agonists or antagonists thereof, include, but are not limited to, HIV Infection, AIDS, bone marrow transplant, and B cell chronic lymphocytic leukemia (CLL).

[0666] In another specific embodiment, polypeptides, antibodies, polynucleotides and/or agonists or antagonists of the present invention are used as an agent to boost immunoresponsiveness among individuals having a temporary immune deficiency. Conditions resulting in a temporary immune deficiency that may be ameliorated or treated by administering the polypeptides, antibodies, polynucleotides and/or agonists or antagonists thereof, include, but are not limited to, recovery from viral infections (e.g., influenza), conditions associated with malnutrition, recovery from infectious mononucleosis, or conditions associated with stress, recovery from measles, recovery from blood transfusion, and recovery from surgery.

[0667] In another specific embodiment, polypeptides, antibodies, polynucleotides and/or agonists or antagonists of the present invention are used as a regulator of antigen presentation by monocytes, dendritic cells, and/or B-cells. In one embodiment, polynucleotides, polypeptides, antibodies, and/or agonists or antagonists of the present invention enhance antigen presentation or antagonizes antigen presentation in vitro or in vivo. Moreover, in related embodiments, said enhancement or antagonism of antigen presentation may be useful as an anti-tumor treatment or to modulate the immune system.

[0668] In another specific embodiment, polypeptides, antibodies, polynucleotides and/or agonists or antagonists of the present invention are used as an agent to direct an individual's immune system towards development of a humoral response (i.e. TH2) as opposed to a TH I cellular response.

[0669] In another specific embodiment, polypeptides, antibodies, polynucleotides and/or agonists or antagonists of the present invention are used as a means to induce tumor proliferation and thus make it more susceptible to anti-neoplastic agents. For example, multiple myeloma is a slowly dividing disease and is thus refractory to virtually all anti-neoplastic regimens. If these cells were forced to proliferate more rapidly their susceptibility profile would likely change.

[0670] In another specific embodiment, polypeptides, antibodies, polynucleotides and/or agonists or antagonists of the present invention are used as a stimulator of B cell production in pathologies such as AIDS, chronic lymphocyte disorder and/or Common Variable Immunodificiency.

[0671] In another specific embodiment, polypeptides, antibodies, polynucleotides and/or agonists or antagonists of the present invention are used as a therapy for generation and/or regeneration of lymphoid tissues following surgery, trauma or genetic defect. In another specific embodiment, polypeptides, antibodies, polynucleotides and/or agonists or antagonists of the present invention are used in the pretreatment of bone marrow samples prior to transplant.

[0672] In another specific embodiment, polypeptides, antibodies, polynucleotides and/or agonists or antagonists of the present invention are used as a gene-based therapy for genetically inherited disorders resulting in immuno-incompetence/immunodeficiency such as observed among SCID patients.

[0673] In another specific embodiment, polypeptides, antibodies, polynucleotides and/or agonists or antagonists of the present invention are used as a means of activating monocytes/macrophages to defend against parasitic diseases that effect monocytes such as Leishmania.

[0674] In another specific embodiment, polypeptides, antibodies, polynucleotides and/or agonists or antagonists of the present invention are used as a means of regulating secreted cytokines that are elicited by polypeptides of the invention.

[0675] In another embodiment, polypeptides, antibodies, polynucleotides and/or agonists or antagonists of the present invention are used in one or more of the applications decribed herein, as they may apply to veterinary medicine.

[0676] In another specific embodiment, polypeptides, antibodies, polynucleotides and/or agonists or antagonists of the present invention are used as a means of blocking various aspects of immune responses to foreign agents or self. Examples of diseases or conditions in which blocking of certain aspects of immune responses may be desired include autoimmune disorders such as lupus, and arthritis, as well as immunoresponsiveness to skin allergies, inflammation, bowel disease, injury and diseases/disorders associated with pathogens.

[0677] In another specific embodiment, polypeptides, antibodies, polynucleotides and/or agonists or antagonists of the present invention are used as a therapy for preventing the B cell proliferation and Ig secretion associated with autoimmune diseases such as idiopathic thrombocytopenic purpura, systemic lupus erythematosus and multiple sclerosis.

[0678] In another specific embodiment, polypeptides, antibodies, polynucleotides and/or agonists or antagonists of the present invention are used as a inhibitor of B and/or T cell migration in endothelial cells. This activity disrupts tissue architecture or cognate responses and is useful, for example in disrupting immune responses, and blocking sepsis.

[0679] In another specific embodiment, polypeptides, antibodies, polynucleotides and/or agonists or antagonists of the present invention are used as a therapy for chronic hypergammaglobulinemia evident in such diseases as monoclonal gammopathy of undetermined significance (MGUS), Waldenstrom's disease, related idiopathic monoclonal gammopathies, and plasmacytomas.

[0680] In another specific embodiment, polypeptides, antibodies, polynucleotides and/or agonists or antagonists of the present invention may be employed for instance to inhibit polypeptide chemotaxis and activation of macrophages and their precursors, and of neutrophils, basophils, B lymphocytes and some T-cell subsets, e.g., activated and CD8 cytotoxic T cells and natural killer cells, in certain autoimmune and chronic inflammatory and infective diseases. Examples of autoimmune diseases are described herein and include multiple sclerosis, and insulin-dependent diabetes.

[0681] The polypeptides, antibodies, polynucleotides and/or agonists or antagonists of the present invention may also be employed to treat idiopathic hyper-eosinophilic syndrome by, for example, preventing eosinophil production and migration.

[0682] In another specific embodiment, polypeptides, antibodies, polynucleotides and/or agonists or antagonists of the present invention are used to enhance or inhibit complement mediated cell lysis.

[0683] In another specific embodiment, polypeptides, antibodies, polynucleotides and/or agonists or antagonists of the present invention are used to enhance or inhibit antibody dependent cellular cytotoxicity.

[0684] In another specific embodiment, polypeptides, antibodies, polynucleotides and/or agonists or antagonists of the present invention may also be employed for treating atherosclerosis, for example, by preventing monocyte infiltration in the artery wall.

[0685] In another specific embodiment, polypeptides, antibodies, polynucleotides and/or agonists or antagonists of the present invention may be employed to treat adult respiratory distress syndrome (ARDS).

[0686] In another specific embodiment, polypeptides, antibodies, polynucleotides and/or agonists or antagonists of the present invention may be useful for stimulating wound and tissue repair, stimulating angiogenesis, and/or stimulating the repair of vascular or lymphatic diseases or disorders. Additionally, agonists and antagonists of the invention may be used to stimulate the regeneration of mucosal surfaces.

[0687] In a specific embodiment, polynucleotides or polypeptides, and/or agonists thereof are used to diagnose, prognose, treat, and/or prevent a disorder characterized by primary or acquired immunodeficiency, deficient serum immunoglobulin production, recurrent infections, and/or immune system dysfunction. Moreover, polynucleotides or polypeptides, and/or agonists thereof may be used to treat or prevent infections of the joints, bones, skin, and/or parotid glands, blood-borne infections (e.g., sepsis, meningitis, septic arthritis, and/or osteomyelitis), autoimmune diseases (e.g., those disclosed herein), inflammatory disorders, and malignancies, and/or any disease or disorder or condition associated with these infections, diseases, disorders and/or malignancies) including, but not limited to, CVID, other primary immune deficiencies, HIV disease, CLL, recurrent bronchitis, sinusitis, otitis media, conjunctivitis, pneumonia, hepatitis, meningitis, herpes zoster (e.g., severe herpes zoster), and/or pneumocystis camii. Other diseases and disorders that may be prevented, diagnosed, prognosed, and/or treated with polynucleotides or polypeptides, and/or agonists of the present invention include, but are not limited to, HIV infection, HTLV-BLV infection, lymphopenia, phagocyte bactericidal dysfunction anemia, thrombocytopenia, and hemoglobinuria.

[0688] In another embodiment, polynucleotides, polypeptides, antibodies, and/or agonists or antagonists of the present invention are used to treat, and/or diagnose an individual having common variable immunodeficiency disease (“CVID”; also known as “acquired agammaglobulinemia” and “acquired hypogammaglobulinemia”) or a subset of this disease.

[0689] In a specific embodiment, polynucleotides, polypeptides, antibodies, and/or agonists or antagonists of the present invention may be used to diagnose, prognose, prevent, and/or treat cancers or neoplasms including immune cell or immune tissue-related cancers or neoplasms. Examples of cancers or neoplasms that may be prevented, diagnosed, or treated by polynucleotides, polypeptides, antibodies, and/or agonists or antagonists of the present invention include, but are not limited to, acute myelogenous leukemia, chronic myelogenous leukemia, Hodgkin's disease, non-Hodgkin's lymphoma, acute lymphocytic anemia (ALL) Chronic lymphocyte leukemia, plasmacytomas, multiple myeloma, Burkitt's lymphoma, EBV-transformed diseases, and/or diseases and disorders described in the section entitled “Hyperproliferative Disorders” elsewhere herein.

[0690] In another specific embodiment, polypeptides, antibodies, polynucleotides and/or agonists or antagonists of the present invention are used as a therapy for decreasing cellular proliferation of Large B-cell Lymphomas.

[0691] In another specific embodiment, polypeptides, antibodies, polynucleotides and/or agonists or antagonists of the present invention are used as a means of decreasing the involvement of B cells and Ig associated with Chronic Myelogenous Leukemia.

[0692] In specific embodiments, the compositions of the invention are used as an agent to boost immunoresponsiveness among B cell immunodeficient individuals, such as, for example, an individual who has undergone a partial or complete splenectomy.

[0693] Antagonists of the invention include, for example, binding and/or inhibitory antibodies, antisense nucleic acids, ribozymes or soluble forms of the polypeptides of the present invention (e.g., Fc fusion protein; see, e.g., Example 9). Agonists of the invention include, for example, binding or stimulatory antibodies, and soluble forms of the polypeptides (e.g., Fc fusion proteins; see, e.g., Example 9). polypeptides, antibodies, polynucleotides and/or agonists or antagonists of the present invention may be employed in a composition with a pharmaceutically acceptable carrier, e.g., as described herein.

[0694] In another embodiment, polypeptides, antibodies, polynucleotides and/or agonists or antagonists of the present invention are administered to an animal (including, but not limited to, those listed above, and also including transgenic animals) incapable of producing functional endogenous antibody molecules or having an otherwise compromised endogenous immune system, but which is capable of producing human immunoglobulin molecules by means of a reconstituted or partially reconstituted immune system from another animal (see, e.g., published PCT Application Nos. WO98/24893, WO/9634096, WO/9633735, and WO/9110741). Administration of polypeptides, antibodies, polynucleotides and/or agonists or antagonists of the present invention to such animals is useful for the generation of monoclonal antibodies against the polypeptides, antibodies, polynucleotides and/or agonists or antagonists of the present invention in an organ system listed above.

Blood-Related Disorders

[0695] The polynucleotides, polypeptides, antibodies, and/or agonists or antagonists of the present invention may be used to modulate hemostatic (the stopping of bleeding) or thrombolytic (clot dissolving) activity. For example, by increasing hemostatic or thrombolytic activity, polynucleotides or polypeptides, and/or agonists or antagonists of the present invention could be used to treat or prevent blood coagulation diseases, disorders, and/or conditions (e.g., afibrinogenemia, factor deficiencies, hemophilia), blood platelet diseases, disorders, and/or conditions (e.g., thrombocytopenia), or wounds resulting from trauma, surgery, or other causes. Alternatively, polynucleotides, polypeptides, antibodies, and/or agonists or antagonists of the present invention that can decrease hemostatic or thrombolytic activity could be used to inhibit or dissolve clotting. These molecules could be important in the treatment or prevention of heart attacks (infarction), strokes, or scarring.

[0696] In specific embodiments, the polynucleotides, polypeptides, antibodies, and/or agonists or antagonists of the present invention may be used to prevent, diagnose, prognose, and/or treat thrombosis, arterial thrombosis, venous thrombosis, thromboembolism, pulmonary embolism, atherosclerosis, myocardial infarction, transient ischemic attack, unstable angina. In specific embodiments, the polynucleotides, polypeptides, antibodies, and/or agonists or antagonists of the present invention may be used for the prevention of occulsion of saphenous grafts, for reducing the risk of periprocedural thrombosis as might accompany angioplasty procedures, for reducing the risk of stroke in patients with atrial fibrillation including nonrheumatic atrial fibrillation, for reducing the risk of embolism associated with mechanical heart valves and or mitral valves disease. Other uses for the polynucleotides, polypeptides, antibodies, and/or agonists or antagonists of the present invention, include, but are not limited to, the prevention of occlusions in extrcorporeal devices (e.g., intravascular canulas, vascular access shunts in hemodialysis patients, hemodialysis machines, and cardiopulmonary bypass machines).

[0697] In another embodiment, a polypeptide of the invention, or polynucleotides, antibodies, agonists, or antagonists corresponding to that polypeptide, may be used to prevent, diagnose, prognose, and/or treat diseases and disorders of the blood and/or blood forming organs associated with the tissue(s) in which the polypeptide of the invention is expressed, including one, two, three, four, five, or more tissues disclosed in Table 1B, column 8 (Tissue Distribution Library Code).

[0698] The polynucleotides, polypeptides, antibodies, and/or agonists or antagonists of the present invention may be used to modulate hematopoietic activity (the formation of blood cells). For example, the polynucleotides, polypeptides, antibodies, and/or agonists or antagonists of the present invention may be used to increase the quantity of all or subsets of blood cells, such as, for example, erythrocytes, lymphocytes (B or T cells), myeloid cells (e.g., basophils, eosinophils, neutrophils, mast cells, macrophages) and platelets. The ability to decrease the quantity of blood cells or subsets of blood cells may be useful in the prevention, detection, diagnosis and/or treatment of anemias and leukopenias described below. Alternatively, the polynucleotides, polypeptides, antibodies, and/or agonists or antagonists of the present invention may be used to decrease the quantity of all or subsets of blood cells, such as, for example, erythrocytes, lymphocytes (B or T cells), myeloid cells (e.g., basophils, eosinophils, neutrophils, mast cells, macrophages) and platelets. The ability to decrease the quantity of blood cells or subsets of blood cells may be useful in the prevention, detection, diagnosis and/or treatment of leukocytoses, such as, for example eosinophilia.

[0699] The polynucleotides, polypeptides, antibodies, and/or agonists or antagonists of the present invention may be used to prevent, treat, or diagnose blood dyscrasia.

[0700] Anemias are conditions in which the number of red blood cells or amount of hemoglobin (the protein that carries oxygen) in them is below normal. Anemia may be caused by excessive bleeding, decreased red blood cell production, or increased red blood cell destruction (hemolysis). The polynucleotides, polypeptides, antibodies, and/or agonists or antagonists of the present invention may be useful in treating, preventing, and/or diagnosing anemias. Anemias that may be treated prevented or diagnosed by the polynucleotides, polypeptides, antibodies, and/or agonists or antagonists of the present invention include iron deficiency anemia, hypochromic anemia, microcytic anemia, chlorosis, hereditary siderob; astic anemia, idiopathic acquired sideroblastic anemia, red cell aplasia, megaloblastic anemia (e.g., pernicious anemia, (vitamin B12 deficiency) and folic acid deficiency anemia), aplastic anemia, hemolytic anemias (e.g., autoimmune helolytic anemia, microangiopathic hemolytic anemia, and paroxysmal nocturnal hemoglobinuria). The polynucleotides, polypeptides, antibodies, and/or agonists or antagonists of the present invention may be useful in treating, preventing, and/or diagnosing anemias associated with diseases including but not limited to, anemias associated with systemic lupus erythematosus, cancers, lymphomas, chronic renal disease, and enlarged spleens. The polynucleotides, polypeptides, antibodies, and/or agonists or antagonists of the present invention may be useful in treating, preventing, and/or diagnosing anemias arising from drug treatments such as anemias associated with methyldopa, dapsone, and/or sulfadrugs. Additionally, rhe polynucleotides, polypeptides, antibodies, and/or agonists or antagonists of the present invention may be useful in treating, preventing, and/or diagnosing anemias associated with abnormal red blood cell architecture including but not limited to, hereditary spherocytosis, hereditary elliptocytosis, glucose-6-phosphate dehydrogenase deficiency, and sickle cell anemia.

[0701] The polynucleotides, polypeptides, antibodies, and/or agonists or antagonists of the present invention may be useful in treating, preventing, and/or diagnosing hemoglobin abnormalities, (e.g., those associated with sickle cell anemia, hemoglobin C disease, hemoglobin S-C disease, and hemoglobin E disease). Additionally, the polynucleotides, polypeptides, antibodies, and/or agonists or antagonists of the present invention may be useful in diagnosing, prognosing, preventing, and/or treating thalassemias, including, but not limited to major and minor forms of alpha-thalassemia and beta-thalassemia.

[0702] In another embodiment, the polynucleotides, polypeptides, antibodies, and/or agonists or antagonists of the present invention may be useful in diagnosing, prognosing, preventing, and/or treating bleeding disorders including, but not limited to, thrombocytopenia (e.g., idiopathic thrombocytopenic purpura, and thrombotic thrombocytopenic purpura), Von Willebrand's disease, hereditary platelet disorders (e.g., storage pool disease such as Chediak-Higashi and Hermansky-Pudlak syndromes, thromboxane A2 dysfunction, thromboasthenia, and Bernard-Soulier syndrome), hemolytic-uremic syndrome, hemophelias such as hemophelia A or Factor VII deficiency and Christmas disease or Factor IX deficiency, Hereditary Hemorhhagic Telangiectsia, also known as Rendu-Osler-Weber syndrome, allergic purpura (Henoch Schonlein purpura) and disseminated intravascular coagulation.

[0703] The effect of the polynucleotides, polypeptides, antibodies, and/or agonists or antagonists of the present invention on the clotting time of blood may be monitored using any of the clotting tests known in the art including, but not limited to, whole blood partial thromboplastin time (PTT), the activated partial thromboplastin time (aPTT), the activated clotting time (ACT), the recalcified activated clotting time, or the Lee-White Clotting time.

[0704] Several diseases and a variety of drugs can cause platelet dysfunction. Thus, in a specific embodiment, the polynucleotides, polypeptides, antibodies, and/or agonists or antagonists of the present invention may be useful in diagnosing, prognosing, preventing, and/or treating acquired platelet dysfunction such as platelet dysfunction accompanying kidney failure, leukemia, multiple myeloma, cirrhosis of the liver, and systemic lupus erythematosus as well as platelet dysfunction associated with drug treatments, including treatment with aspirin, ticlopidine, nonsteroidal anti-inflammatory drugs (used for arthritis, pain, and sprains), and penicillin in high doses.

[0705] In another embodiment, the polynucleotides, polypeptides, antibodies, and/or agonists or antagonists of the present invention may be useful in diagnosing, prognosing, preventing, and/or treating diseases and disorders characterized by or associated with increased or decreased numbers of white blood cells. Leukopenia occurs when the number of white blood cells decreases below normal. Leukopenias include, but are not limited to, neutropenia and lymphocytopenia. An increase in the number of white blood cells compared to normal is known as leukocytosis. The body generates increased numbers of white blood cells during infection. Thus, leukocytosis may simply be a normal physiological parameter that reflects infection. Alternatively, leukocytosis may be an indicator of injury or other disease such as cancer. Leokocytoses, include but are not limited to, eosinophilia, and accumulations of macrophages. In specific embodiments, the polynucleotides, polypeptides, antibodies, and/or agonists or antagonists of the present invention may be useful in diagnosing, prognosing, preventing, and/or treating leukopenia. In other specific embodiments, the polynucleotides, polypeptides, antibodies, and/or agonists or antagonists of the present invention may be useful in diagnosing, prognosing, preventing, and/or treating leukocytosis.

[0706] Leukopenia may be a generalized decreased in all types of white blood cells, or may be a specific depletion of particular types of white blood cells. Thus, in specific embodiments, the polynucleotides, polypeptides, antibodies, and/or agonists or antagonists of the present invention may be useful in diagnosing, prognosing, preventing, and/or treating decreases in neutrophil numbers, known as neutropenia. Neutropenias that may be diagnosed, prognosed, prevented, and/or treated by the polynucleotides, polypeptides, antibodies, and/or agonists or antagonists of the present invention include, but are not limited to, infantile genetic agranulocytosis, familial neutropenia, cyclic neutropenia, neutropenias resulting from or associated with dietary deficiencies (e.g., vitamin B 12 deficiency or folic acid deficiency), neutropenias resulting from or associated with drug treatments (e.g., antibiotic regimens such as penicillin treatment, sulfonamide treatment, anticoagulant treatment, anticonvulsant drugs, anti-thyroid drugs, and cancer chemotherapy), and neutropenias resulting from increased neutrophil destruction that may occur in association with some bacterial or viral infections, allergic disorders, autoimmune diseases, conditions in which an individual has an enlarged spleen (e.g., Felty syndrome, malaria and sarcoidosis), and some drug treatment regimens.

[0707] The polynucleotides, polypeptides, antibodies, and/or agonists or antagonists of the present invention may be useful in diagnosing, prognosing, preventing, and/or treating lymphocytopenias (decreased numbers of B and/or T lymphocytes), including, but not limited lymphocytopenias resulting from or associated with stress, drug treatments (e.g., drug treatment with corticosteroids, cancer chemotherapies, and/or radiation therapies), AIDS infection and/or other diseases such as, for example, cancer, rheumatoid arthritis, systemic lupus erythematosus, chronic infections, some viral infections and/or hereditary disorders (e.g., DiGeorge syndrome, Wiskott-Aldrich Syndome, severe combined immunodeficiency, ataxia telangiectsia).

[0708] The polynucleotides, polypeptides, antibodies, and/or agonists or antagonists of the present invention may be useful in diagnosing, prognosing, preventing, and/or treating diseases and disorders associated with macrophage numbers and/or macrophage function including, but not limited to, Gaucher's disease, Niemann-Pick disease, Letterer-Siwe disease and Hand-Schuller-Christian disease.

[0709] In another embodiment, the polynucleotides, polypeptides, antibodies, and/or agonists or antagonists of the present invention may be useful in diagnosing, prognosing, preventing, and/or treating diseases and disorders associated with eosinophil numbers and/or eosinophil function including, but not limited to, idiopathic hypereosinophilic syndrome, eosinophilia-myalgia syndrome, and Hand-Schuller-Christian disease.

[0710] In yet another embodiment, the polynucleotides, polypeptides, antibodies, and/or agonists or antagonists of the present invention may be useful in diagnosing, prognosing, preventing, and/or treating leukemias and lymphomas including, but not limited to, acute lymphocytic (lymphpblastic) leukemia (ALL), acute myeloid (myelocytic, myelogenous, myeloblastic, or myelomonocytic) leukemia, chronic lymphocytic leukemia (e.g., B cell leukemias, T cell leukemias, Sezary syndrome, and Hairy cell leukenia), chronic myelocytic (myeloid, myelogenous, or granulocytic) leukemia, Hodgkin's lymphoma, non-hodgkin's lymphoma, Burkitt's lymphoma, and mycosis fungoides.

[0711] In other embodiments, the polynucleotides, polypeptides, antibodies, and/or agonists or antagonists of the present invention may be useful in diagnosing, prognosing, preventing, and/or treating diseases and disorders of plasma cells including, but not limited to, plasma cell dyscrasias, monoclonal gammaopathies, monoclonal gammopathies of undetermined significance, multiple myeloma, macroglobulinemia, Waldenstrom's macroglobulinemia, cryoglobulinemia, and Raynaud's phenomenon.

[0712] In other embodiments, the polynucleotides, polypeptides, antibodies, and/or agonists or antagonists of the present invention may be useful in treating, preventing, and/or diagnosing myeloproliferative disorders, including but not limited to, polycythemia vera, relative polycythemia, secondary polycythemia, myelofibrosis, acute myelofibrosis, agnogenicmyelod metaplasia, thrombocythemia, (including both primary and seconday thrombocythemia) and chronic myelocytic leukemia.

[0713] In other embodiments, the polynucleotides, polypeptides, antibodies, and/or agonists or antagonists of the present invention may be useful as a treatment prior to surgery, to increase blood cell production.

[0714] In other embodiments, the polynucleotides, polypeptides, antibodies, and/or agonists or antagonists of the present invention may be useful as an agent to enhance the migration, phagocytosis, superoxide production, antibody dependent cellular cytotoxicity of neutrophils, eosionophils and macrophages.

[0715] In other embodiments, the polynucleotides, polypeptides, antibodies, and/or agonists or antagonists of the present invention may be useful as an agent to increase the number of stem cells in circulation prior to stem cells pheresis. In another specific embodiment, the polynucleotides, polypeptides, antibodies, and/or agonists or antagonists of the present invention may be useful as an agent to increase the number of stem cells in circulation prior to platelet pheresis.

[0716] In other embodiments, the polynucleotides, polypeptides, antibodies, and/or agonists or antagonists of the present invention may be useful as an agent to increase cytokine production.

[0717] In other embodiments, the polynucleotides, polypeptides, antibodies, and/or agonists or antagonists of the present invention may be useful in preventing, diagnosing, and/or treating primary hematopoietic disorders.

Hyperproliferative Disorders

[0718] In certain embodiments, polynucleotides or polypeptides, or agonists or antagonists of the present invention can be used to treat or detect hyperproliferative disorders, including neoplasms. Polynucleotides or polypeptides, or agonists or antagonists of the present invention may inhibit the proliferation of the disorder through direct or indirect interactions. Alternatively, Polynucleotides or polypeptides, or agonists or antagonists of the present invention may proliferate other cells which can inhibit the hyperproliferative disorder.

[0719] For example, by increasing an immune response, particularly increasing antigenic qualities of the hyperproliferative disorder or by proliferating, differentiating, or mobilizing T-cells, hyperproliferative disorders can be treated. This immune response may be increased by either enhancing an existing immune response, or by initiating a new immune response. Alternatively, decreasing an immune response may also be a method of treating hyperproliferative disorders, such as a chemotherapeutic agent.

[0720] Examples of hyperproliferative disorders that can be treated or detected by polynucleotides or polypeptides, or agonists or antagonists of the present invention include, but are not limited to neoplasms located in the: colon, abdomen, bone, breast, digestive system, liver, pancreas, peritoneum, endocrine glands (adrenal, parathyroid, pituitary, testicles, ovary, thymus, thyroid), eye, head and neck, nervous (central and peripheral), lymphatic system, pelvis, skin, soft tissue, spleen, thorax, and urogenital tract.

[0721] Similarly, other hyperproliferative disorders can also be treated or detected by polynucleotides or polypeptides, or agonists or antagonists of the present invention. Examples of such hyperproliferative disorders include, but are not limited to: Acute Childhood Lymphoblastic Leukemia, Acute Lymphoblastic Leukemia, Acute Lymphocytic Leukemia, Acute Myeloid Leukemia, Adrenocortical Carcinoma, Adult (Primary) Hepatocellular Cancer, Adult (Primary) Liver Cancer, Adult Acute Lymphocytic Leukemia, Adult Acute Myeloid Leukemia, Adult Hodgkin's Disease, Adult Hodgkin's Lymphoma, Adult Lymphocytic Leukemia, Adult Non-Hodgkin's Lymphoma, Adult Primary Liver Cancer, Adult Soft Tissue Sarcoma, AIDS-Related Lymphoma, AIDS-Related Malignancies, Anal Cancer, Astrocytoma, Bile Duct Cancer, Bladder Cancer, Bone Cancer, Brain Stem Glioma, Brain Tumors, Breast Cancer, Cancer of the Renal Pelvis and Ureter, Central Nervous System (Primary) Lymphoma, Central Nervous System Lymphoma, Cerebellar Astrocytoma, Cerebral Astrocytoma, Cervical Cancer, Childhood (Primary) Hepatocellular Cancer, Childhood (Primary) Liver Cancer, Childhood Acute Lymphoblastic Leukemia, Childhood Acute Myeloid Leukemia, Childhood Brain Stem Glioma, Childhood Cerebellar Astrocytoma, Childhood Cerebral Astrocytoma, Childhood Extracranial Germ Cell Tumors, Childhood Hodgkin's Disease, Childhood Hodgkin's Lymphoma, Childhood Hypothalamic and Visual Pathway Glioma, Childhood Lymphoblastic Leukemia, Childhood Medulloblastoma, Childhood Non-Hodgkin's Lymphoma, Childhood Pineal and Supratentorial Primitive Neuroectodermal Tumors, Childhood Primary Liver Cancer, Childhood Rhabdomyosarcoma, Childhood Soft Tissue Sarcoma, Childhood Visual Pathway and Hypothalamic Glioma, Chronic Lymphocytic Leukemia, Chronic Myelogenous Leukemia, Colon Cancer, Cutaneous T-Cell Lymphoma, Endocrine Pancreas Islet Cell Carcinoma, Endometrial Cancer, Ependymoma, Epithelial Cancer, Esophageal Cancer, Ewing's Sarcoma and Related Tumors, Exocrine Pancreatic Cancer, Extracranial Germ Cell Tumor, Extragonadal Germ Cell Tumor, Extrahepatic Bile Duct Cancer, Eye Cancer, Female Breast Cancer, Gaucher's Disease, Gallbladder Cancer, Gastric Cancer, Gastrointestinal Carcinoid Tumor, Gastrointestinal Tumors, Germ Cell Tumors, Gestational Trophoblastic Tumor, Hairy Cell Leukemia, Head and Neck Cancer, Hepatocellular Cancer, Hodgkin's Disease, Hodgkin's Lymphoma, Hypergammaglobulinemia, Hypopharyngeal Cancer, Intestinal Cancers, Intraocular Melanoma, Islet Cell Carcinoma, Islet Cell Pancreatic Cancer, Kaposi's Sarcoma, Kidney Cancer, Laryngeal Cancer, Lip and Oral Cavity Cancer, Liver Cancer, Lung Cancer, Lymphoproliferative Disorders, Macroglobulinemia, Male Breast Cancer, Malignant Mesothelioma, Malignant Thymoma, Medulloblastoma, Melanoma, Mesothelioma, Metastatic Occult Primary Squamous Neck Cancer, Metastatic Primary Squamous Neck Cancer, Metastatic Squamous Neck Cancer, Multiple Myeloma, Multiple Myeloma/Plasma Cell Neoplasm, Myelodysplastic Syndrome, Myelogenous Leukemia, Myeloid Leukemia, Myeloproliferative Disorders, Nasal Cavity and Paranasal Sinus Cancer, Nasopharyngeal Cancer, Neuroblastoma, Non-Hodgkin's Lymphoma During Pregnancy, Nonmelanoma Skin Cancer, Non-Small Cell Lung Cancer, Occult Primary Metastatic Squamous Neck Cancer, Oropharyngeal Cancer, Osteo-/Malignant Fibrous Sarcoma, Osteosarcoma/Malignant Fibrous Histiocytoma, Osteosarcoma/Malignant Fibrous Histiocytoma of Bone, Ovarian Epithelial Cancer, Ovarian Germ Cell Tumor, Ovarian Low Malignant Potential Tumor, Pancreatic Cancer, Paraproteinemias, Purpura, Parathyroid Cancer, Penile Cancer, Pheochromocytoma, Pituitary Tumor, Plasma Cell Neoplasm/Multiple Myeloma, Primary Central Nervous System Lymphoma, Primary Liver Cancer, Prostate Cancer, Rectal Cancer, Renal Cell Cancer, Renal Pelvis and Ureter Cancer, Retinoblastoma, Rhabdomyosarcoma, Salivary Gland Cancer, Sarcoidosis Sarcomas, Sezary Syndrome, Skin Cancer, Small Cell Lung Cancer, Small Intestine Cancer, Soft Tissue Sarcoma, Squamous Neck Cancer, Stomach Cancer, Supratentorial Primitive Neuroectodermal and Pineal Tumors, T-Cell Lymphoma, Testicular Cancer, Thymoma, Thyroid Cancer, Transitional Cell Cancer of the Renal Pelvis and Ureter, Transitional Renal Pelvis and Ureter Cancer, Trophoblastic Tumors, Ureter and Renal Pelvis Cell Cancer, Urethral Cancer, Uterine Cancer, Uterine Sarcoma, Vaginal Cancer, Visual Pathway and Hypothalamic Glioma, Vulvar Cancer, Waldenstrom's Macroglobulinemia, Wilms' Tumor, and any other hyperproliferative disease, besides neoplasia, located in an organ system listed above.

[0722] In another preferred embodiment, polynucleotides or polypeptides, or agonists or antagonists of the present invention are used to diagnose, prognose, prevent, and/or treat premalignant conditions and to prevent progression to a neoplastic or malignant state, including but not limited to those disorders described above. Such uses are indicated in conditions known or suspected of preceding progression to neoplasia or cancer, in particular, where non-neoplastic cell growth consisting of hyperplasia, metaplasia, or most particularly, dysplasia has occurred (for review of such abnormal growth conditions, see Robbins and Angell, 1976, Basic Pathology, 2d Ed., W. B. Saunders Co., Philadelphia, pp. 68-79.)

[0723] Hyperplasia is a form of controlled cell proliferation, involving an increase in cell number in a tissue or organ, without significant alteration in structure or function. Hyperplastic disorders which can be diagnosed, prognosed, prevented, and/or treated with compositions of the invention (including polynucleotides, polypeptides, agonists or antagonists) include, but are not limited to, angiofollicular mediastinal lymph node hyperplasia, angiolymphoid hyperplasia with eosinophilia, atypical melanocytic hyperplasia, basal cell hyperplasia, benign giant lymph node hyperplasia, cementum hyperplasia, congenital adrenal hyperplasia, congenital sebaceous hyperplasia, cystic hyperplasia, cystic hyperplasia of the breast, denture hyperplasia, ductal hyperplasia, endometrial hyperplasia, fibromuscular hyperplasia, focal epithelial hyperplasia, gingival hyperplasia, inflammatory fibrous hyperplasia, inflammatory papillary hyperplasia, intravascular papillary endothelial hyperplasia, nodular hyperplasia of prostate, nodular regenerative hyperplasia, pseudoepitheliomatous hyperplasia, senile sebaceous hyperplasia, and verrucous hyperplasia.

[0724] Metaplasia is a form of controlled cell growth in which one type of adult or fully differentiated cell substitutes for another type of adult cell. Metaplastic disorders which can be diagnosed, prognosed, prevented, and/or treated with compositions of the invention (including polynucleotides, polypeptides, agonists or antagonists) include, but are not limited to, agnogenic myeloid metaplasia, apocrine metaplasia, atypical metaplasia, autoparenchymatous metaplasia, connective tissue metaplasia, epithelial metaplasia, intestinal metaplasia, metaplastic anemia, metaplastic ossification, metaplastic polyps, myeloid metaplasia, primary myeloid metaplasia, secondary myeloid metaplasia, squamous metaplasia, squamous metaplasia of amnion, and symptomatic myeloid metaplasia.

[0725] Dysplasia is frequently a forerunner of cancer, and is found mainly in the epithelia; it is the most disorderly form of non-neoplastic cell growth, involving a loss in individual cell uniformity and in the architectural orientation of cells. Dysplastic cells often have abnormally large, deeply stained nuclei, and exhibit pleomorphism. Dysplasia characteristically occurs where there exists chronic irritation or inflammation. Dysplastic disorders which can be diagnosed, prognosed, prevented, and/or treated with compositions of the invention (including polynucleotides, polypeptides, agonists or antagonists) include, but are not limited to, anhidrotic ectodermal dysplasia, anterofacial dysplasia, asphyxiating thoracic dysplasia, atriodigital dysplasia, bronchopulmonary dysplasia, cerebral dysplasia, cervical dysplasia, chondroectodermal dysplasia, cleidocranial dysplasia, congenital ectodermal dysplasia, craniodiaphysial dysplasia, craniocarpotarsal dysplasia, craniometaphysial dysplasia, dentin dysplasia, diaphysial dysplasia, ectodermal dysplasia, enamel dysplasia, encephalo-ophthalmic dysplasia, dysplasia epiphysialis hemimelia, dysplasia epiphysialis multiplex, dysplasia epiphysialis punctata, epithelial dysplasia, faciodigitogenital dysplasia, familial fibrous dysplasia of jaws, familial white folded dysplasia, fibromuscular dysplasia, fibrous dysplasia of bone, florid osseous dysplasia, hereditary renal-retinal dysplasia, hidrotic ectodermal dysplasia, hypohidrotic ectodermal dysplasia, lymphopenic thymic dysplasia, mammary dysplasia, mandibulofacial dysplasia, metaphysial dysplasia, Mondini dysplasia, monostotic fibrous dysplasia, mucoepithelial dysplasia, multiple epiphysial dysplasia, oculoauriculovertebral dysplasia, oculodentodigital dysplasia, oculovertebral dysplasia, odontogenic dysplasia, ophthalmomandibulomelic dysplasia, periapical cemental dysplasia, polyostotic fibrous dysplasia, pseudoachondroplastic spondyloepiphysial dysplasia, retinal dysplasia, septo-optic dysplasia, spondyloepiphysial dysplasia, and ventriculoradial dysplasia.

[0726] Additional pre-neoplastic disorders which can be diagnosed, prognosed, prevented, and/or treated with compositions of the invention (including polynucleotides, polypeptides, agonists or antagonists) include, but are not limited to, benign dysproliferative disorders (e.g., benign tumors, fibrocystic conditions, tissue hypertrophy, intestinal polyps, colon polyps, and esophageal dysplasia), leukoplakia, keratoses, Bowen's disease, Farmer's Skin, solar cheilitis, and solar keratosis.

[0727] In another embodiment, a polypeptide of the invention, or polynucleotides, antibodies, agonists, or antagonists corresponding to that polypeptide, may be used to diagnose and/or prognose disorders associated with the tissue(s) in which the polypeptide of the invention is expressed, including one, two, three, four, five, or more tissues disclosed in Table 1B, column 8 (Tissue Distribution Library Code).

[0728] In another embodiment, polynucleotides, polypeptides, antibodies, and/or agonists or antagonists of the present invention conjugated to a toxin or a radioactive isotope, as described herein, may be used to treat cancers and neoplasms, including, but not limited to those described herein. In a further preferred embodiment, polynucleotides, polypeptides, antibodies, and/or agonists or antagonists of the present invention conjugated to a toxin or a radioactive isotope, as described herein, may be used to treat acute myelogenous leukemia.

[0729] Additionally, polynucleotides, polypeptides, and/or agonists or antagonists of the invention may affect apoptosis, and therefore, would be useful in treating a number of diseases associated with increased cell survival or the inhibition of apoptosis. For example, diseases associated with increased cell survival or the inhibition of apoptosis that could be diagnosed, prognosed, prevented, and/or treated by polynucleotides, polypeptides, and/or agonists or antagonists of the invention, include cancers (such as follicular lymphomas, carcinomas with p53 mutations, and hormone-dependent tumors, including, but not limited to colon cancer, cardiac tumors, pancreatic cancer, melanoma, retinoblastoma, glioblastoma, lung cancer, intestinal cancer, testicular cancer, stomach cancer, neuroblastoma, myxoma, myoma, lymphoma, endothelioma, osteoblastoma, osteoclastoma, osteosarcoma, chondrosarcoma, adenoma, breast cancer, prostate cancer, Kaposi's sarcoma and ovarian cancer); autoimmune disorders such as, multiple sclerosis, Sjogren's syndrome, Hashimoto's thyroiditis, biliary cirrhosis, Behcet's disease, Crohn's disease, polymyositis, systemic lupus erythematosus and immune-related glomerulonephritis and rheumatoid arthritis) and viral infections (such as herpes viruses, pox viruses and adenoviruses), inflammation, graft v. host disease, acute graft rejection, and chronic graft rejection.

[0730] In preferred embodiments, polynucleotides, polypeptides, and/or agonists or antagonists of the invention are used to inhibit growth, progression, and/or metastasis of cancers, in particular those listed above.

[0731] Additional diseases or conditions associated with increased cell survival that could be diagnosed, prognosed, prevented, and/or treated by polynucleotides, polypeptides, and/or agonists or antagonists of the invention, include, but are not limited to, progression, and/or metastases of malignancies and related disorders such as leukemia (including acute leukemias (e.g., acute lymphocytic leukemia, acute myelocytic leukemia (including myeloblastic, promyelocytic, myelomonocytic, monocytic, and erythroleukemia)) and chronic leukemias (e.g., chronic myelocytic (granulocytic) leukemia and chronic lymphocytic leukemia)), polycythemia vera, lymphomas (e.g., Hodgkin's disease and non-Hodgkin's disease), multiple myeloma, Waldenstrom's macroglobulinemia, heavy chain disease, and solid tumors including, but not limited to, sarcomas and carcinomas such as fibrosarcoma, myxosarcoma, liposarcoma, chondrosarcoma, osteogenic sarcoma, chordoma, angiosarcoma, endotheliosarcoma, lymphangiosarcoma, lymphangioendotheliosarcoma, synovioma, mesothelioma, Ewing's tumor, leiomyosarcoma, rhabdomyosarcoma, colon carcinoma, pancreatic cancer, breast cancer, ovarian cancer, prostate cancer, squamous cell carcinoma, basal cell carcinoma, adenocarcinoma, sweat gland carcinoma, sebaceous gland carcinoma, papillary carcinoma, papillary adenocarcinomas, cystadenocarcinoma, medullary carcinoma, bronchogenic carcinoma, renal cell carcinoma, hepatoma, bile duct carcinoma, choriocarcinoma, seminoma, embryonal carcinoma, Wilm's tumor, cervical cancer, testicular tumor, lung carcinoma, small cell lung carcinoma, bladder carcinoma, epithelial carcinoma, glioma, astrocytoma, medulloblastoma, craniopharyngioma, ependymoma, pinealoma, emangioblastoma, acoustic neuroma, oligodendroglioma, menangioma, melanoma, neuroblastoma, and retinoblastoma.

[0732] Diseases associated with increased apoptosis that could be diagnosed, prognosed, prevented, and/or treated by polynucleotides, polypeptides, and/or agonists or antagonists of the invention, include AIDS; neurodegenerative disorders (such as Alzheimer's disease, Parkinson's disease, amyotrophic lateral sclerosis, retinitis pigmentosa, cerebellar degeneration and brain tumor or prior associated disease); autoimmune disorders (such as, multiple sclerosis, Sjogren's syndrome, Hashimoto's thyroiditis, biliary cirrhosis, Behcet's disease, Crohn's disease, polymyositis, systemic lupus erythematosus and immune-related glomerulonephritis and rheumatoid arthritis) myelodysplastic syndromes (such as aplastic anemia), graft v. host disease, ischemic injury (such as that caused by myocardial infarction, stroke and reperfusion injury), liver injury (e.g., hepatitis related liver injury, ischemia/reperfusion injury, cholestosis (bile duct injury) and liver cancer); toxin-induced liver disease (such as that caused by alcohol), septic shock, cachexia and anorexia.

[0733] Hyperproliferative diseases and/or disorders that could be diagnosed, prognosed, prevented, and/or treated by polynucleotides, polypeptides, and/or agonists or antagonists of the invention, include, but are not limited to, neoplasms located in the liver, abdomen, bone, breast, digestive system, pancreas, peritoneum, endocrine glands (adrenal, parathyroid, pituitary, testicles, ovary, thymus, thyroid), eye, head and neck, nervous system (central and peripheral), lymphatic system, pelvis, skin, soft tissue, spleen, thorax, and urogenital tract.

[0734] Similarly, other hyperproliferative disorders can also be diagnosed, prognosed, prevented, and/or treated by polynucleotides, polypeptides, and/or agonists or antagonists of the invention. Examples of such hyperproliferative disorders include, but are not limited to: hypergammaglobulinemia, lymphoproliferative disorders, paraproteinemias, purpura, sarcoidosis, Sezary Syndrome, Waldenstron's macroglobulinemia, Gaucher's Disease, histiocytosis, and any other hyperproliferative disease, besides neoplasia, located in an organ system listed above.

[0735] Another preferred embodiment utilizes polynucleotides of the present invention to inhibit aberrant cellular division, by gene therapy using the present invention, and/or protein fusions or fragments thereof.

[0736] Thus, the present invention provides a method for treating cell proliferative disorders by inserting into an abnormally proliferating cell a polynucleotide of the present invention, wherein said polynucleotide represses said expression.

[0737] Another embodiment of the present invention provides a method of treating cell-proliferative disorders in individuals comprising administration of one or more active gene copies of the present invention to an abnormally proliferating cell or cells. In a preferred embodiment, polynucleotides of the present invention is a DNA construct comprising a recombinant expression vector effective in expressing a DNA sequence encoding said polynucleotides. In another preferred embodiment of the present invention, the DNA construct encoding the poynucleotides of the present invention is inserted into cells to be treated utilizing a retrovirus, or more preferably an adenoviral vector (See G J. Nabel, et. al., PNAS 1999 96: 324-326, which is hereby incorporated by reference). In a most preferred embodiment, the viral vector is defective and will not transform non-proliferating cells, only proliferating cells. Moreover, in a preferred embodiment, the polynucleotides of the present invention inserted into proliferating cells either alone, or in combination with or fused to other polynucleotides, can then be modulated via an external stimulus (i.e. magnetic, specific small molecule, chemical, or drug administration, etc.), which acts upon the promoter upstream of said polynucleotides to induce expression of the encoded protein product. As such the beneficial therapeutic affect of the present invention may be expressly modulated (i.e. to increase, decrease, or inhibit expression of the present invention) based upon said external stimulus.

[0738] Polynucleotides of the present invention may be useful in repressing expression of oncogenic genes or antigens. By “repressing expression of the oncogenic genes” is intended the suppression of the transcription of the gene, the degradation of the gene transcript (pre-message RNA), the inhibition of splicing, the destruction of the messenger RNA, the prevention of the post-translational modifications of the protein, the destruction of the protein, or the inhibition of the normal function of the protein.

[0739] For local administration to abnormally proliferating cells, polynucleotides of the present invention may be administered by any method known to those of skill in the art including, but not limited to transfection, electroporation, microinjection of cells, or in vehicles such as liposomes, lipofectin, or as naked polynucleotides, or any other method described throughout the specification. The polynucleotide of the present invention may be delivered by known gene delivery systems such as, but not limited to, retroviral vectors (Gilboa, J. Virology 44:845 (1982); Hocke, Nature 320:275 (1986); Wilson, et al., Proc. Natl. Acad. Sci. U.S.A. 85:3014), vaccinia virus system (Chakrabarty et al., Mol. Cell Biol. 5:3403 (1985) or other efficient DNA delivery systems (Yates et al., Nature 313:812 (1985)) known to those skilled in the art. These references are exemplary only and are hereby incorporated by reference. In order to specifically deliver or transfect cells which are abnormally proliferating and spare non-dividing cells, it is preferable to utilize a retrovirus, or adenoviral (as described in the art and elsewhere herein) delivery system known to those of skill in the art. Since host DNA replication is required for retroviral DNA to integrate and the retrovirus will be unable to self replicate due to the lack of the retrovirus genes needed for its life cycle. Utilizing such a retroviral delivery system for polynucleotides of the present invention will target said gene and constructs to abnormally proliferating cells and will spare the non-dividing normal cells.

[0740] The polynucleotides of the present invention may be delivered directly to cell proliferative disorder/disease sites in internal organs, body cavities and the like by use of imaging devices used to guide an injecting needle directly to the disease site. The polynucleotides of the present invention may also be administered to disease sites at the time of surgical intervention.

[0741] By “cell proliferative disease” is meant any human or animal disease or disorder, affecting any one or any combination of organs, cavities, or body parts, which is characterized by single or multiple local abnormal proliferations of cells, groups of cells, or tissues, whether benign or malignant.

[0742] Any amount of the polynucleotides of the present invention may be administered as long as it has a biologically inhibiting effect on the proliferation of the treated cells. Moreover, it is possible to administer more than one of the polynucleotide of the present invention simultaneously to the same site. By “biologically inhibiting” is meant partial or total growth inhibition as well as decreases in the rate of proliferation or growth of the cells. The biologically inhibitory dose may be determined by assessing the effects of the polynucleotides of the present invention on target malignant or abnormally proliferating cell growth in tissue culture, tumor growth in animals and cell cultures, or any other method known to one of ordinary skill in the art.

[0743] The present invention is further directed to antibody-based therapies which involve administering of anti-polypeptides and anti-polynucleotide antibodies to a mammalian, preferably human, patient for treating one or more of the described disorders. Methods for producing anti-polypeptides and anti-polynucleotide antibodies polyclonal and monoclonal antibodies are described in detail elsewhere herein. Such antibodies may be provided in pharmaceutically acceptable compositions as known in the art or as described herein.

[0744] A summary of the ways in which the antibodies of the present invention may be used therapeutically includes binding polynucleotides or polypeptides of the present invention locally or systemically in the body or by direct cytotoxicity of the antibody, e.g. as mediated by complement (CDC) or by effector cells (ADCC). Some of these approaches are described in more detail below. Armed with the teachings provided herein, one of ordinary skill in the art will know how to use the antibodies of the present invention for diagnostic, monitoring or therapeutic purposes without undue experimentation.

[0745] In particular, the antibodies, fragments and derivatives of the present invention are useful for treating a subject having or developing cell proliferative and/or differentiation disorders as described herein. Such treatment comprises administering a single or multiple doses of the antibody, or a fragment, derivative, or a conjugate thereof.

[0746] The antibodies of this invention may be advantageously utilized in combination with other monoclonal or chimeric antibodies, or with lymphokines or hematopoietic growth factors, for example., which serve to increase the number or activity of effector cells which interact with the antibodies.

[0747] It is preferred to use high affinity and/or potent in vivo inhibiting and/or neutralizing antibodies against polypeptides or polynucleotides of the present invention, fragments or regions thereof, for both immunoassays directed to and therapy of disorders related to polynucleotides or polypeptides, including fragements thereof, of the present invention. Such antibodies, fragments, or regions, will preferably have an affinity for polynucleotides or polypeptides, including fragements thereof. Preferred binding affinities include those with a dissociation constant or Kd less than 5×10⁻⁻⁶M, 10⁻⁶M, 5×10⁻⁷M, 10⁻⁷M, 5×10⁻⁸ M, 10⁻M, 5×10⁻⁹M, 10⁻⁹M, 5×10⁻¹⁰M, 10⁻¹⁰M, 5×10⁻¹¹M, 10⁻¹¹M, 5×10⁻¹²M, 10⁻¹²M, 5×10⁻¹³M, 10⁻¹³M, 5×10⁻¹⁴M, 10⁻¹⁴M, 5×10⁻¹⁵M, and 10⁻¹⁵M.

[0748] Moreover, polypeptides of the present invention are useful in inhibiting the angiogenesis of proliferative cells or tissues, either alone, as a protein fusion, or in combination with other polypeptides directly or indirectly, as described elsewhere herein. In a most preferred embodiment, said anti-angiogenesis effect may be achieved indirectly, for example, through the inhibition of hematopoietic, tumor-specific cells, such as tumor-associated macrophages (See Joseph I B, et al. J Natl Cancer Inst, 90(21):1648-53 (1998), which is hereby incorporated by reference). Antibodies directed to polypeptides or polynucleotides of the present invention may also result in inhibition of angiogenesis directly, or indirectly (See Witte L, et al., Cancer Metastasis Rev. 17(2):155-61 (1998), which is hereby incorporated by reference)).

[0749] Polypeptides, including protein fusions, of the present invention, or fragments thereof may be useful in inhibiting proliferative cells or tissues through the induction of apoptosis. Said polypeptides may act either directly, or indirectly to induce apoptosis of proliferative cells and tissues, for example in the activation of a death-domain receptor, such as tumor necrosis factor (TNF) receptor-1, CD95 (Fas/APO-1), TNF-receptor-related apoptosis-mediated protein (TRAMP) and TNF-related apoptosis-inducing ligand (TRAIL) receptor-1 and -2 (See Schulze-Osthoff K, et.al., Eur J Biochem 254(3):439-59 (1998), which is hereby incorporated by reference). Moreover, in another preferred embodiment of the present invention, said polypeptides may induce apoptosis through other mechanisms, such as in the activation of other proteins which will activate apoptosis, or through stimulating the expression of said proteins, either alone or in combination with small molecule drugs or adjuviants, such as apoptonin, galectins, thioredoxins, anti-inflammatory proteins (See for example, Mutat Res 400(1-2):447-55 (1998), Med Hypotheses. 50(5):423-33 (1998), Chem Biol Interact. April 24; 111-112:23-34 (1998), J Mol Med. 76(6):402-12 (1998), Int J Tissue React; 20(1):3-15 (1998), which are all hereby incorporated by reference).

[0750] Polypeptides, including protein fusions to, or fragments thereof, of the present invention are useful in inhibiting the metastasis of proliferative cells or tissues. Inhibition may occur as a direct result of administering polypeptides, or antibodies directed to said polypeptides as described elsewere herein, or indirectly, such as activating the expression of proteins known to inhibit metastasis, for example alpha 4 integrins, (See, e.g., Curr Top Microbiol Immunol 1998; 231:125-41, which is hereby incorporated by reference). Such thereapeutic affects of the present invention may be achieved either alone, or in combination with small molecule drugs or adjuvants.

[0751] In another embodiment, the invention provides a method of delivering compositions containing the polypeptides of the invention (e.g., compositions containing polypeptides or polypeptide antibodes associated with heterologous polypeptides, heterologous nucleic acids, toxins, or prodrugs) to targeted cells expressing the polypeptide of the present invention. Polypeptides or polypeptide antibodes of the invention may be associated with with heterologous polypeptides, heterologous nucleic acids, toxins, or prodrugs via hydrophobic, hydrophilic, ionic and/or covalent interactions.

[0752] Polypeptides, protein fusions to, or fragments thereof, of the present invention are useful in enhancing the immunogenicity and/or antigenicity of proliferating cells or tissues, either directly, such as would occur if the polypeptides of the present invention ‘vaccinated’ the immune response to respond to proliferative antigens and immunogens, or indirectly, such as in activating the expression of proteins known to enhance the immune response (e.g. chemokines), to said antigens and immunogens.

Renal Disorders

[0753] Polynucleotides, polypeptides, antibodies, and/or agonists or antagonists of the present invention, may be used to treat, prevent, diagnose, and/or prognose disorders of the renal system. Renal disorders which can be diagnosed, prognosed, prevented, and/or treated with compositions of the invention include, but are not limited to, kidney failure, nephritis, blood vessel disorders of kidney, metabolic and congenital kidney disorders, urinary disorders of the kidney, autoimmune disorders, sclerosis and necrosis, electrolyte imbalance, and kidney cancers.

[0754] Kidney diseases which can be diagnosed, prognosed, prevented, and/or treated with compositions of the invention include, but are not limited to, acute kidney failure, chronic kidney failure, atheroembolic renal failure, end-stage renal disease, inflammatory diseases of the kidney (e.g., acute glomerulonephritis, postinfectious glomerulonephritis, rapidly progressive glomerulonephritis, nephrotic syndrome, membranous glomerulonephritis, familial nephrotic syndrome, membranoproliferative glomerulonephritis I and II, mesangial proliferative glomerulonephritis, chronic glomerulonephritis, acute tubulointerstitial nephritis, chronic tubulointerstitial nephritis, acute post-streptococcal glomerulonephritis (PSGN), pyelonephritis, lupus nephritis, chronic nephritis, interstitial nephritis, and post-streptococcal glomerulonephritis), blood vessel disorders of the kidneys (e.g., kidney infarction, atheroembolic kidney disease, cortical necrosis, malignant nephrosclerosis, renal vein thrombosis, renal underperfusion, renal retinopathy, renal ischemia-reperfusion, renal artery embolism, and renal artery stenosis), and kidney disorders resulting form urinary tract disease (e.g., pyelonephritis, hydronephrosis, urolithiasis (renal lithiasis, nephrolithiasis), reflux nephropathy, urinary tract infections, urinary retention, and acute or chronic unilateral obstructive uropathy.)

[0755] In addition, compositions of the invention can be used to diagnose, prognose, prevent, and/or treat metabolic and congenital disorders of the kidney (e.g., uremia, renal amyloidosis, renal osteodystrophy, renal tubular acidosis, renal glycosuria, nephrogenic diabetes insipidus, cystinuria, Fanconi's syndrome, renal fibrocystic osteosis (renal rickets), Hartnup disease, Bartter's syndrome, Liddle's syndrome, polycystic kidney disease, medullary cystic disease, medullary sponge kidney, Alport's syndrome, nail-patella syndrome, congenital nephrotic syndrome, CRUSH syndrome, horseshoe kidney, diabetic nephropathy, nephrogenic diabetes insipidus, analgesic nephropathy, kidney stones, and membranous nephropathy), and autoimmune disorders of the kidney (e.g., systemic lupus erythematosus (SLE), Goodpasture syndrome, IgA nephropathy, and IgM mesangial proliferative glomerulonephritis).

[0756] Compositions of the invention can also be used to diagnose, prognose, prevent, and/or treat sclerotic or necrotic disorders of the kidney (e.g., glomerulosclerosis, diabetic nephropathy, focal segmental glomerulosclerosis (FSGS), necrotizing glomerulonephritis, and renal papillary necrosis), cancers of the kidney (e.g., nephroma, hypemephroma, nephroblastoma, renal cell cancer, transitional cell cancer, renal adenocarcinoma, squamous cell cancer, and Wilm's tumor), and electrolyte imbalances (e.g., nephrocalcinosis, pyuria, edema, hydronephritis, proteinuria, hyponatremia, hypematremia, hypokalemia, hyperkalemia, hypocalcemia, hypercalcemia, hypophosphatemia, and hyperphosphatemia).

[0757] Polypeptides may be administered using any method known in the art, including, but not limited to, direct needle injection at the delivery site, intravenous injection, topical administration, catheter infusion, biolistic injectors, particle accelerators, gelfoam sponge depots, other commercially available depot materials, osmotic pumps, oral or suppositorial solid pharmaceutical formulations, decanting or topical applications during surgery, aerosol delivery. Such methods are known in the art. Polypeptides may be administered as part of a Therapeutic, described in more detail below. Methods of delivering polynucleotides are described in more detail herein.

Cardiovascular Disorders

[0758] Polynucleotides or polypeptides, or agonists or antagonists of the present invention, may be used to treat, prevent, diagnose, and/or prognose cardiovascular disorders, including, but not limited to, peripheral artery disease, such as limb ischemia.

[0759] Cardiovascular disorders include, but are not limited to, cardiovascular abnormalities, such as arterio-arterial fistula, arteriovenous fistula, cerebral arteriovenous malformations, congenital heart defects, pulmonary atresia, and Scimitar Syndrome. Congenital heart defects include, but are not limited to, aortic coarctation, cor triatriatum, coronary vessel anomalies, crisscross heart, dextrocardia, patent ductus arteriosus, Ebstein's anomaly, Eisenmenger complex, hypoplastic left heart syndrome, levocardia, tetralogy of fallot, transposition of great vessels, double outlet right ventricle, tricuspid atresia, persistent truncus arteriosus, and heart septal defects, such as aortopulmonary septal defect, endocardial cushion defects, Lutembacher's Syndrome, trilogy of Fallot, ventricular heart septal defects.

[0760] Cardiovascular disorders also include, but are not limited to, heart disease, such as arrhythmias, carcinoid heart disease, high cardiac output, low cardiac output, cardiac tamponade, endocarditis (including bacterial), heart aneurysm, cardiac arrest, congestive heart failure, congestive cardiomyopathy, paroxysmal dyspnea, cardiac edema, heart hypertrophy, congestive cardiomyopathy, left ventricular hypertrophy, right ventricular hypertrophy, post-infarction heart rupture, ventricular septal rupture, heart valve diseases, myocardial diseases, myocardial ischemia, pericardial effusion, pericarditis (including constrictive and tuberculous), pneumopericardium, postpericardiotomy syndrome, pulmonary heart disease, rheumatic heart disease, ventricular dysfunction, hyperemia, cardiovascular pregnancy complications, Scimitar Syndrome, cardiovascular syphilis, and cardiovascular tuberculosis.

[0761] Arrhythmias include, but are not limited to, sinus arrhythmia, atrial fibrillation, atrial flutter, bradycardia, extrasystole, Adams-Stokes Syndrome, bundle-branch block, sinoatrial block, long QT syndrome, parasystole, Lown-Ganong-Levine Syndrome, Mahaim-type pre-excitation syndrome, Wolff-Parkinson-White syndrome, sick sinus syndrome, tachycardias, and ventricular fibrillation. Tachycardias include paroxysmal tachycardia, supraventricular tachycardia, accelerated idioventricular rhythm, atrioventricular nodal reentry tachycardia, ectopic atrial tachycardia, ectopic junctional tachycardia, sinoatrial nodal reentry tachycardia, sinus tachycardia, Torsades de Pointes, and ventricular tachycardia.

[0762] Heart valve diseases include, but are not limited to, aortic valve insufficiency, aortic valve stenosis, hear murmurs, aortic valve prolapse, mitral valve prolapse, tricuspid valve prolapse, mitral valve insufficiency, mitral valve stenosis, pulmonary atresia, pulmonary valve insufficiency, pulmonary valve stenosis, tricuspid atresia, tricuspid valve insufficiency, and tricuspid valve stenosis.

[0763] Myocardial diseases include, but are not limited to, alcoholic cardiomyopathy, congestive cardiomyopathy, hypertrophic cardiomyopathy, aortic subvalvular stenosis, pulmonary subvalvular stenosis, restrictive cardiomyopathy, Chagas cardiomyopathy, endocardial fibroelastosis, endomyocardial fibrosis, Kearns Syndrome, myocardial reperfusion injury, and myocarditis.

[0764] Myocardial ischemias include, but are not limited to, coronary disease, such as angina pectoris, coronary aneurysm, coronary arteriosclerosis, coronary thrombosis, coronary vasospasm, myocardial infarction and myocardial stunning.

[0765] Cardiovascular diseases also include vascular diseases such as aneurysms, angiodysplasia, angiomatosis, bacillary angiomatosis, Hippel-Lindau Disease, Klippel-Trenaunay-Weber Syndrome, Sturge-Weber Syndrome, angioneurotic edema, aortic diseases, Takayasu's Arteritis, aortitis, Leriche's Syndrome, arterial occlusive diseases, arteritis, enarteritis, polyarteritis nodosa, cerebrovascular disorders, diabetic angiopathies, diabetic retinopathy, embolisms, thrombosis, erythromelalgia, hemorrhoids, hepatic veno-occlusive disease, hypertension, hypotension, ischemia, peripheral vascular diseases, phlebitis, pulmonary veno-occlusive disease, Raynaud's disease, CREST syndrome, retinal vein occlusion, Scimitar syndrome, superior vena cava syndrome, telangiectasia, atacia telangiectasia, hereditary hemorrhagic telangiectasia, varicocele, varicose veins, varicose ulcer, vasculitis, and venous insufficiency.

[0766] Aneurysms include, but are not limited to, dissecting aneurysms, false aneurysms, infected aneurysms, ruptured aneurysms, aortic aneurysms, cerebral aneurysms, coronary aneurysms, heart aneurysms, and iliac aneurysms.

[0767] Arterial occlusive diseases include, but are not limited to, arteriosclerosis, intermittent claudication, carotid stenosis, fibromuscular dysplasias, mesenteric vascular occlusion, Moyamoya disease, renal artery obstruction, retinal artery occlusion, and thromboangiitis obliterans.

[0768] Cerebrovascular disorders include, but are not limited to, carotid artery diseases, cerebral amyloid angiopathy, cerebral aneurysm, cerebral anoxia, cerebral arteriosclerosis, cerebral arteriovenous malformation, cerebral artery diseases, cerebral embolism and thrombosis, carotid artery thrombosis, sinus thrombosis, Wallenberg's syndrome, cerebral hemorrhage, epidural hematoma, subdural hematoma, subaraxhnoid hemorrhage, cerebral infarction, cerebral ischemia (including transient), subclavian steal syndrome, periventricular leukomalacia, vascular headache, cluster headache, migraine, and vertebrobasilar insufficiency.

[0769] Embolisms include, but are not limited to, air embolisms, amniotic fluid embolisms, cholesterol embolisms, blue toe syndrome, fat embolisms, pulmonary embolisms, and thromoboembolisms. Thrombosis include, but are not limited to, coronary thrombosis, hepatic vein thrombosis, retinal vein occlusion, carotid artery thrombosis, sinus thrombosis, Wallenberg's syndrome, and thrombophlebitis.

[0770] Ischemic disorders include, but are not limited to, cerebral ischemia, ischemic colitis, compartment syndromes, anterior compartment syndrome, myocardial ischemia, reperfusion injuries, and peripheral limb ischemia. Vasculitis includes, but is not limited to, aortitis, arteritis, Behcet's Syndrome, Churg-Strauss Syndrome, mucocutaneous lymph node syndrome, thromboangiitis obliterans, hypersensitivity vasculitis, Schoenlein-Henoch purpura, allergic cutaneous vasculitis, and Wegener's granulomatosis.

[0771] Polypeptides may be administered using any method known in the art, including, but not limited to, direct needle injection at the delivery site, intravenous injection, topical administration, catheter infusion, biolistic injectors, particle accelerators, gelfoam sponge depots, other commercially available depot materials, osmotic pumps, oral or suppositorial solid pharmaceutical formulations, decanting or topical applications during surgery, aerosol delivery. Such methods are known in the art. Polypeptides may be administered as part of a Therapeutic, described in more detail below. Methods of delivering polynucleotides are described in more detail herein.

Respiratory Disorders

[0772] Polynucleotides or polypeptides, or agonists or antagonists of the present invention may be used to treat, prevent, diagnose, and/or prognose diseases and/or disorders of the respiratory system.

[0773] Diseases and disorders of the respiratory system include, but are not limited to, nasal vestibulitis, nonallergic rhinitis (e.g., acute rhinitis, chronic rhinitis, atrophic rhinitis, vasomotor rhinitis), nasal polyps, and sinusitis, juvenile angiofibromas, cancer of the nose and juvenile papillomas, vocal cord polyps, nodules (singer's nodules), contact ulcers, vocal cord paralysis, laryngoceles, pharyngitis (e.g., viral and bacterial), tonsillitis, tonsillar cellulitis, parapharyngeal abscess, laryngitis, laryngoceles, and throat cancers (e.g., cancer of the nasopharynx, tonsil cancer, larynx cancer), lung cancer (e.g., squamous cell carcinoma, small cell (oat cell) carcinoma, large cell carcinoma, and adenocarcinoma), allergic disorders (eosinophilic pneumonia, hypersensitivity pneumonitis (e.g., extrinsic allergic alveolitis, allergic interstitial pneumonitis, organic dust pneumoconiosis, allergic bronchopulmonary aspergillosis, asthma, Wegener's granulomatosis (granulomatous vasculitis), Goodpasture's syndrome)), pneumonia (e.g., bacterial pneumonia (e.g., Streptococcus pneumoniae (pneumoncoccal pneumonia), Staphylococcus aureus (staphylococcal pneumonia), Gram-negative bacterial pneumonia (caused by, e.g., Klebsiella and Pseudomas spp.), Mycoplasma pneumoniae pneumonia, Hemophilus influenzae pneumonia, Legionella pneumophila (Legionnaires' disease), and Chlamydia psittaci (Psittacosis)), and viral pneumonia (e.g., influenza, chickenpox (varicella).

[0774] Additional diseases and disorders of the respiratory system include, but are not limited to bronchiolitis, polio (poliomyelitis), croup, respiratory syncytial viral infection, mumps, erythema infectiosum (fifth disease), roseola infantum, progressive rubella panencephalitis, german measles, and subacute sclerosing panencephalitis), fungal pneumonia (e.g., Histoplasmosis, Coccidioidomycosis, Blastomycosis, fungal infections in people with severely suppressed immune systems (e.g., cryptococcosis, caused by Cryptococcus neoformans; aspergillosis, caused by Aspergillus spp.; candidiasis, caused by Candida; and mucormycosis)), Pneumocystis carinii (pneumocystis pneumonia), atypical pneumonias (e.g., Mycoplasma and Chlamydia spp.), opportunistic infection pneumonia, nosocomial pneumonia, chemical pneumonitis, and aspiration pneumonia, pleural disorders (e.g., pleurisy, pleural effusion, and pneumothorax (e.g., simple spontaneous pneumothorax, complicated spontaneous pneumothorax, tension pneumothorax)), obstructive airway diseases (e.g., asthma, chronic obstructive pulmonary disease (COPD), emphysema, chronic or acute bronchitis), occupational lung diseases (e.g., silicosis, black lung (coal workers' pneumoconiosis), asbestosis, berylliosis, occupational asthsma, byssinosis, and benign pneumoconioses), Infiltrative Lung Disease (e.g., pulmonary fibrosis (e.g., fibrosing alveolitis, usual interstitial pneumonia), idiopathic pulmonary fibrosis, desquamative interstitial pneumonia, lymphoid interstitial pneumonia, histiocytosis X (e.g., Letterer-Siwe disease, Hand-Schuller-Christian disease, eosinophilic granuloma), idiopathic pulmonary hemosiderosis, sarcoidosis and pulmonary alveolar proteinosis), Acute respiratory distress syndrome (also called, e.g., adult respiratory distress syndrome), edema, pulmonary embolism, bronchitis (e.g., viral, bacterial), bronchiectasis, atelectasis, lung abscess (caused by, e.g., Staphylococcus aureus or Legionella pneumophila), and cystic fibrosis.

Anti-Angiogenesis Activity

[0775] The naturally occurring balance between endogenous stimulators and inhibitors of angiogenesis is one in which inhibitory influences predominate. Rastinejad et al., Cell 56:345-355 (1989). In those rare instances in which neovascularization occurs under normal physiological conditions, such as wound healing, organ regeneration, embryonic development, and female reproductive processes, angiogenesis is stringently regulated and spatially and temporally delimited. Under conditions of pathological angiogenesis such as that characterizing solid tumor growth, these regulatory controls fail. Unregulated angiogenesis becomes pathologic and sustains progression of many neoplastic and non-neoplastic diseases. A number of serious diseases are dominated by abnormal neovascularization including solid tumor growth and metastases, arthritis, some types of eye disorders, and psoriasis. See, e.g., reviews by Moses et al., Biotech. 9:630-634 (1991); Folkman et al., N. Engl. J. Med., 333:1757-1763 (1995); Auerbach et al., J. Microvasc. Res. 29:401-411 (1985); Folkman, Advances in Cancer Research, eds. Klein and Weinhouse, Academic Press, New York, pp. 175-203 (1985); Patz, Am. J. Opthalmol. 94:715-743 (1982); and Folkman et al., Science 221:719-725 (1983). In a number of pathological conditions, the process of angiogenesis contributes to the disease state. For example, significant data have accumulated which suggest that the growth of solid tumors is dependent on angiogenesis. Folkman and Klagsbrun, Science 235:442-447 (1987).

[0776] The present invention provides for treatment of diseases or disorders associated with neovascularization by administration of the polynucleotides and/or polypeptides of the invention, as well as agonists or antagonists of the present invention. Malignant and metastatic conditions which can be treated with the polynucleotides and polypeptides, or agonists or antagonists of the invention include, but are not limited to, malignancies, solid tumors, and cancers described herein and otherwise known in the art (for a review of such disorders, see Fishman et al., Medicine, 2d Ed., J. B. Lippincott Co., Philadelphia (1985)). Thus, the present invention provides a method of treating an angiogenesis-related disease and/or disorder, comprising administering to an individual in need thereof a therapeutically effective amount of a polynucleotide, polypeptide, antagonist and/or agonist of the invention. For example, polynucleotides, polypeptides, antagonists and/or agonists may be utilized in a variety of additional methods in order to therapeutically treat a cancer or tumor. Cancers which may be treated with polynucleotides, polypeptides, antagonists and/or agonists include, but are not limited to solid tumors, including prostate, lung, breast, ovarian, stomach, pancreas, larynx, esophagus, testes, liver, parotid, biliary tract, colon, rectum, cervix, uterus, endometrium, kidney, bladder, thyroid cancer; primary tumors and metastases; melanomas; glioblastoma; Kaposi's sarcoma; leiomyosarcoma; non-small cell lung cancer; colorectal cancer; advanced malignancies; and blood born tumors such as leukemias. For example, polynucleotides, polypeptides, antagonists and/or agonists may be delivered topically, in order to treat cancers such as skin cancer, head and neck tumors, breast tumors, and Kaposi's sarcoma.

[0777] Within yet other aspects, polynucleotides, polypeptides, antagonists and/or agonists may be utilized to treat superficial forms of bladder cancer by, for example, intravesical administration. Polynucleotides, polypeptides, antagonists and/or agonists may be delivered directly into the tumor, or near the tumor site, via injection or a catheter. Of course, as the artisan of ordinary skill will appreciate, the appropriate mode of administration will vary according to the cancer to be treated. Other modes of delivery are discussed herein.

[0778] Polynucleotides, polypeptides, antagonists and/or agonists may be useful in treating other disorders, besides cancers, which involve angiogenesis. These disorders include, but are not limited to: benign tumors, for example hemangiomas, acoustic neuromas, neurofibromas, trachomas, and pyogenic granulomas; artheroscleric plaques; ocular angiogenic diseases, for example, diabetic retinopathy, retinopathy of prematurity, macular degeneration, corneal graft rejection, neovascular glaucoma, retrolental fibroplasia, rubeosis, retinoblastoma, uvietis and Pterygia (abnormal blood vessel growth) of the eye; rheumatoid arthritis; psoriasis; delayed wound healing; endometriosis; vasculogenesis; granulations; hypertrophic scars (keloids); nonunion fractures; scleroderma; trachoma; vascular adhesions; myocardial angiogenesis; coronary collaterals; cerebral collaterals; arteriovenous malformations; ischemic limb angiogenesis; Osler-Webber Syndrome; plaque neovascularization; telangiectasia; hemophiliac joints; angiofibroma; fibromuscular dysplasia; wound granulation; Crohn's disease; and atherosclerosis.

[0779] For example, within one aspect of the present invention methods are provided for treating hypertrophic scars and keloids, comprising the step of administering a polynucleotide, polypeptide, antagonist and/or agonist of the invention to a hypertrophic scar or keloid.

[0780] Within one embodiment of the present invention polynucleotides, polypeptides, antagonists and/or agonists of the invention are directly injected into a hypertrophic scar or keloid, in order to prevent the progression of these lesions. This therapy is of particular value in the prophylactic treatment of conditions which are known to result in the development of hypertrophic scars and keloids (e.g., burns), and is preferably initiated after the proliferative phase has had time to progress (approximately 14 days after the initial injury), but before hypertrophic scar or keloid development. As noted above, the present invention also provides methods for treating neovascular diseases of the eye, including for example, corneal neovascularization, neovascular glaucoma, proliferative diabetic retinopathy, retrolental fibroplasia and macular degeneration.

[0781] Moreover, Ocular disorders associated with neovascularization which can be treated with the polynucleotides and polypeptides of the present invention (including agonists and/or antagonists) include, but are not limited to: neovascular glaucoma, diabetic retinopathy, retinoblastoma, retrolental fibroplasia, uveitis, retinopathy of prematurity macular degeneration, corneal graft neovascularization, as well as other eye inflammatory diseases, ocular tumors and diseases associated with choroidal or iris neovascularization. See, e.g., reviews by Waltman et al., Am. J. Ophthal. 85:704-710 (1978) and Gartner et al., Surv. Ophthal. 22:291-312 (1978).

[0782] Thus, within one aspect of the present invention methods are provided for treating neovascular diseases of the eye such as corneal neovascularization (including corneal graft neovascularization), comprising the step of administering to a patient a therapeutically effective amount of a compound (as described above) to the cornea, such that the formation of blood vessels is inhibited. Briefly, the cornea is a tissue which normally lacks blood vessels. In certain pathological conditions however, capillaries may extend into the cornea from the pericorneal vascular plexus of the limbus. When the cornea becomes vascularized, it also becomes clouded, resulting in a decline in the patient's visual acuity. Visual loss may become complete if the cornea completely opacitates. A wide variety of disorders can result in corneal neovascularization, including for example, corneal infections (e.g., trachoma, herpes simplex keratitis, leishmaniasis and onchocerciasis), immunological processes (e.g., graft rejection and Stevens-Johnson's syndrome), alkali burns, trauma, inflammation (of any cause), toxic and nutritional deficiency states, and as a complication of wearing contact lenses.

[0783] Within particularly preferred embodiments of the invention, may be prepared for topical administration in saline (combined with any of the preservatives and antimicrobial agents commonly used in ocular preparations), and administered in eyedrop form. The solution or suspension may be prepared in its pure form and administered several times daily. Alternatively, anti-angiogenic compositions, prepared as described above, may also be administered directly to the cornea. Within preferred embodiments, the anti-angiogenic composition is prepared with a muco-adhesive polymer which binds to cornea. Within further embodiments, the anti-angiogenic factors or anti-angiogenic compositions may be utilized as an adjunct to conventional steroid therapy. Topical therapy may also be useful prophylactically in corneal lesions which are known to have a high probability of inducing an angiogenic response (such as chemical burns). In these instances the treatment, likely in combination with steroids, may be instituted immediately to help prevent subsequent complications.

[0784] Within other embodiments, the compounds described above may be injected directly into the corneal stroma by an ophthalmologist under microscopic guidance. The preferred site of injection may vary with the morphology of the individual lesion, but the goal of the administration would be to place the composition at the advancing front of the vasculature (i.e., interspersed between the blood vessels and the normal cornea). In most cases this would involve perilimbic corneal injection to “protect” the cornea from the advancing blood vessels. This method may also be utilized shortly after a corneal insult in order to prophylactically prevent corneal neovascularization. In this situation the material could be injected in the perilimbic cornea interspersed between the corneal lesion and its undesired potential limbic blood supply. Such methods may also be utilized in a similar fashion to prevent capillary invasion of transplanted corneas. In a sustained-release form injections might only be required 2-3 times per year. A steroid could also be added to the injection solution to reduce inflammation resulting from the injection itself.

[0785] Within another aspect of the present invention, methods are provided for treating neovascular glaucoma, comprising the step of administering to a patient a therapeutically effective amount of a polynucleotide, polypeptide, antagonist and/or agonist to the eye, such that the formation of blood vessels is inhibited. In one embodiment, the compound may be administered topically to the eye in order to treat early forms of neovascular glaucoma. Within other embodiments, the compound may be implanted by injection into the region of the anterior chamber angle. Within other embodiments, the compound may also be placed in any location such that the compound is continuously released into the aqueous humor. Within another aspect of the present invention, methods are provided for treating proliferative diabetic retinopathy, comprising the step of administering to a patient a therapeutically effective amount of a polynucleotide, polypeptide, antagonist and/or agonist to the eyes, such that the formation of blood vessels is inhibited.

[0786] Within particularly preferred embodiments of the invention, proliferative diabetic retinopathy may be treated by injection into the aqueous humor or the vitreous, in order to increase the local concentration of the polynucleotide, polypeptide, antagonist and/or agonist in the retina. Preferably, this treatment should be initiated prior to the acquisition of severe disease requiring photocoagulation.

[0787] Within another aspect of the present invention, methods are provided for treating retrolental fibroplasia, comprising the step of administering to a patient a therapeutically effective amount of a polynucleotide, polypeptide, antagonist and/or agonist to the eye, such that the formation of blood vessels is inhibited. The compound may be administered topically, via intravitreous injection and/or via intraocular implants.

[0788] Additionally, disorders which can be treated with the polynucleotides, polypeptides, agonists and/or agonists include, but are not limited to, hemangioma, arthritis, psoriasis, angiofibroma, atherosclerotic plaques, delayed wound healing, granulations, hemophilic joints, hypertrophic scars, nonunion fractures, Osler-Weber syndrome, pyogenic granuloma, scleroderma, trachoma, and vascular adhesions.

[0789] Moreover, disorders and/or states, which can be treated, prevented, diagnosed, and/or prognosed with the the polynucleotides, polypeptides, agonists and/or agonists of the invention include, but are not limited to, solid tumors, blood born tumors such as leukemias, tumor metastasis, Kaposi's sarcoma, benign tumors, for example hemangiomas, acoustic neuromas, neurofibromas, trachomas, and pyogenic granulomas, rheumatoid arthritis, psoriasis, ocular angiogenic diseases, for example, diabetic retinopathy, retinopathy of prematurity, macular degeneration, corneal graft rejection, neovascular glaucoma, retrolental fibroplasia, rubeosis, retinoblastoma, and uvietis, delayed wound healing, endometriosis, vascluogenesis, granulations, hypertrophic scars (keloids), nonunion fractures, scleroderma, trachoma, vascular adhesions, myocardial angiogenesis, coronary collaterals, cerebral collaterals, arteriovenous malformations, ischemic limb angiogenesis, Osler-Webber Syndrome, plaque neovascularization, telangiectasia, hemophiliac joints, angiofibroma fibromuscular dysplasia, wound granulation, Crohn's disease, atherosclerosis, birth control agent by preventing vascularization required for embryo implantation controlling menstruation, diseases that have angiogenesis as a pathologic consequence such as cat scratch disease (Rochele minalia quintosa), ulcers (Helicobacter pylori), Bartonellosis and bacillary angiomatosis.

[0790] In one aspect of the birth control method, an amount of the compound sufficient to block embryo implantation is administered before or after intercourse and fertilization have occurred, thus providing an effective method of birth control, possibly a “morning after” method. Polynucleotides, polypeptides, agonists and/or agonists may also be used in controlling menstruation or administered as either a peritoneal lavage fluid or for peritoneal implantation in the treatment of endometriosis.

[0791] Polynucleotides, polypeptides, agonists and/or agonists of the present invention may be incorporated into surgical sutures in order to prevent stitch granulomas.

[0792] Polynucleotides, polypeptides, agonists and/or agonists may be utilized in a wide variety of surgical procedures. For example, within one aspect of the present invention a compositions (in the form of, for example, a spray or film) may be utilized to coat or spray an area prior to removal of a tumor, in order to isolate normal surrounding tissues from malignant tissue, and/or to prevent the spread of disease to surrounding tissues. Within other aspects of the present invention, compositions (e.g., in the form of a spray) may be delivered via endoscopic procedures in order to coat tumors, or inhibit angiogenesis in a desired locale. Within yet other aspects of the present invention, surgical meshes which have been coated with anti-angiogenic compositions of the present invention may be utilized in any procedure wherein a surgical mesh might be utilized. For example, within one embodiment of the invention a surgical mesh laden with an anti-angiogenic composition may be utilized during abdominal cancer resection surgery (e.g., subsequent to colon resection) in order to provide support to the structure, and to release an amount of the anti-angiogenic factor.

[0793] Within further aspects of the present invention, methods are provided for treating tumor excision sites, comprising administering a polynucleotide, polypeptide, agonist and/or agonist to the resection margins of a tumor subsequent to excision, such that the local recurrence of cancer and the formation of new blood vessels at the site is inhibited. Within one embodiment of the invention, the anti-angiogenic compound is administered directly to the tumor excision site (e.g., applied by swabbing, brushing or otherwise coating the resection margins of the tumor with the anti-angiogenic compound). Alternatively, the anti-angiogenic compounds may be incorporated into known surgical pastes prior to administration. Within particularly preferred embodiments of the invention, the anti-angiogenic compounds are applied after hepatic resections for malignancy, and after neurosurgical operations.

[0794] Within one aspect of the present invention, polynucleotides, polypeptides, agonists and/or agonists may be administered to the resection margin of a wide variety of tumors, including for example, breast, colon, brain and hepatic tumors. For example, within one embodiment of the invention, anti-angiogenic compounds may be administered to the site of a neurological tumor subsequent to excision, such that the formation of new blood vessels at the site are inhibited.

[0795] The polynucleotides, polypeptides, agonists and/or agonists of the present invention may also be administered along with other anti-angiogenic factors. Representative examples of other anti-angiogenic factors include: Anti-Invasive Factor, retinoic acid and derivatives thereof, paclitaxel, Suramin, Tissue Inhibitor of Metalloproteinase-1, Tissue Inhibitor of Metalloproteinase-2, Plasminogen Activator Inhibitor-1, Plasminogen Activator Inhibitor-2, and various forms of the lighter “d group” transition metals.

[0796] Lighter “d group” transition metals include, for example, vanadium, molybdenum, tungsten, titanium, niobium, and tantalum species. Such transition metal species may form transition metal complexes. Suitable complexes of the above-mentioned transition metal species include oxo transition metal complexes.

[0797] Representative examples of vanadium complexes include oxo vanadium complexes such as vanadate and vanadyl complexes. Suitable vanadate complexes include metavanadate and orthovanadate complexes such as, for example, ammonium metavanadate, sodium metavanadate, and sodium orthovanadate. Suitable vanadyl complexes include, for example, vanadyl acetylacetonate and vanadyl sulfate including vanadyl sulfate hydrates such as vanadyl sulfate mono- and trihydrates.

[0798] Representative examples of tungsten and molybdenum complexes also include oxo complexes. Suitable oxo tungsten complexes include tungstate and tungsten oxide complexes. Suitable tungstate complexes include ammonium tungstate, calcium tungstate, sodium tungstate dihydrate, and tungstic acid. Suitable tungsten oxides include tungsten (IV) oxide and tungsten (VI) oxide. Suitable oxo molybdenum complexes include molybdate, molybdenum oxide, and molybdenyl complexes. Suitable molybdate complexes include ammonium molybdate and its hydrates, sodium molybdate and its hydrates, and potassium molybdate and its hydrates. Suitable molybdenum oxides include molybdenum (VI) oxide, molybdenum (VI) oxide, and molybdic acid. Suitable molybdenyl complexes include, for example, molybdenyl acetylacetonate. Other suitable tungsten and molybdenum complexes include hydroxo derivatives derived from, for example, glycerol, tartaric acid, and sugars.

[0799] A wide variety of other anti-angiogenic factors may also be utilized within the context of the present invention. Representative examples include platelet factor 4; protamine sulphate; sulphated chitin derivatives (prepared from queen crab shells), (Murata et al., Cancer Res. 51:22-26, 1991); Sulphated Polysaccharide Peptidoglycan Complex (SP-PG) (the function of this compound may be enhanced by the presence of steroids such as estrogen, and tamoxifen citrate); Staurosporine; modulators of matrix metabolism, including for example, proline analogs, cishydroxyproline, d, L-3,4-dehydroproline, Thiaproline, alpha, alpha-dipyridyl, aminopropionitrile fumarate; 4-propyl-5-(4-pyridinyl)-2(3H)-oxazolone; Methotrexate; Mitoxantrone; Heparin; Interferons; 2 Macroglobulin-serum; ChIMP-3 (Pavloff et al., J. Bio. Chem. 267:17321-17326, 1992); Chymostatin (Tomkinson et al., Biochem J. 286:475-480, 1992); Cyclodextrin Tetradecasulfate; Eponemycin; Camptothecin; Fumagillin (Ingber et al., Nature 348:555-557, 1990); Gold Sodium Thiomalate (“GST”; Matsubara and Ziff, J. Clin. Invest. 79:1440-1446, 1987); anticollagenase-serum; alpha2-antiplasmin (Holmes et al., J. Biol. Chem. 262(4):1659-1664, 1987); Bisantrene (National Cancer Institute); Lobenzarit disodium (N-(2)-carboxyphenyl-4-chloroanthronilic acid disodium or “CCA”; Takeuchi et al., Agents Actions 36:312-316, 1992); Thalidomide; Angostatic steroid; AGM-1470; carboxynaminolmidazole; and metalloproteinase inhibitors such as BB94.

Diseases at the Cellular Level

[0800] Diseases associated with increased cell survival or the inhibition of apoptosis that could be treated, prevented, diagnosed, and/or prognosed using polynucleotides or polypeptides, as well as antagonists or agonists of the present invention, include cancers (such as follicular lymphomas, carcinomas with p53 mutations, and hormone-dependent tumors, including, but not limited to colon cancer, cardiac tumors, pancreatic cancer, melanoma, retinoblastoma, glioblastoma, lung cancer, intestinal cancer, testicular cancer, stomach cancer, neuroblastoma, myxoma, myoma, lymphoma, endothelioma, osteoblastoma, osteoclastoma, osteosarcoma, chondrosarcoma, adenoma, breast cancer, prostate cancer, Kaposi's sarcoma and ovarian cancer); autoimmune disorders (such as, multiple sclerosis, Sjogren's syndrome, Hashimoto's thyroiditis, biliary cirrhosis, Behcet's disease, Crohn's disease, polymyositis, systemic lupus erythematosus and immune-related glomerulonephritis and rheumatoid arthritis) and viral infections (such as herpes viruses, pox viruses and adenoviruses), inflammation, graft v. host disease, acute graft rejection, and chronic graft rejection.

[0801] In preferred embodiments, polynucleotides, polypeptides, and/or antagonists of the invention are used to inhibit growth, progression, and/or metasis of cancers, in particular those listed above.

[0802] Additional diseases or conditions associated with increased cell survival that could be treated or detected by polynucleotides or polypeptides, or agonists or antagonists of the present invention include, but are not limited to, progression, and/or metastases of malignancies and related disorders such as leukemia (including acute leukemias (e.g., acute lymphocytic leukemia, acute myelocytic leukemia (including myeloblastic, promyelocytic, myelomonocytic, monocytic, and erythroleukemia)) and chronic leukemias (e.g., chronic myelocytic (granulocytic) leukemia and chronic lymphocytic leukemia)), polycythemia vera, lymphomas (e.g., Hodgkin's disease and non-Hodgkin's disease), multiple myeloma, Waldenstrom's macroglobulinemia, heavy chain disease, and solid tumors including, but not limited to, sarcomas and carcinomas such as fibrosarcoma, myxosarcoma, liposarcoma, chondrosarcoma, osteogenic sarcoma, chordoma, angiosarcoma, endotheliosarcoma, lymphangiosarcoma, lymphangioendotheliosarcoma, synovioma, mesothelioma, Ewing's tumor, leiomyosarcoma, rhabdomyosarcoma, colon carcinoma, pancreatic cancer, breast cancer, ovarian cancer, prostate cancer, squamous cell carcinoma, basal cell carcinoma, adenocarcinoma, sweat gland carcinoma, sebaceous gland carcinoma, papillary carcinoma, papillary adenocarcinomas, cystadenocarcinoma, medullary carcinoma, bronchogenic carcinoma, renal cell carcinoma, hepatoma, bile duct carcinoma, choriocarcinoma, seminoma, embryonal carcinoma, Wilm's tumor, cervical cancer, testicular tumor, lung carcinoma, small cell lung carcinoma, bladder carcinoma, epithelial carcinoma, glioma, astrocytoma, medulloblastoma, craniopharyngioma, ependymoma, pinealoma, hemangioblastoma, acoustic neuroma, oligodendroglioma, menangioma, melanoma, neuroblastoma, and retinoblastoma.

[0803] Diseases associated with increased apoptosis that could be treated, prevented, diagnosed, and/or prognesed using polynucleotides or polypeptides, as well as agonists or antagonists of the present invention, include, but are not limited to, AIDS; neurodegenerative disorders (such as Alzheimer's disease, Parkinson's disease, Amyotrophic lateral sclerosis, Retinitis pigmentosa, Cerebellar degeneration and brain tumor or prior associated disease); autoimmune disorders (such as, multiple sclerosis, Sjogren's syndrome, Hashimoto's thyroiditis, biliary cirrhosis, Behcet's disease, Crohn's disease, polymyositis, systemic lupus erythematosus and immune-related glomerulonephritis and rheumatoid arthritis) myelodysplastic syndromes (such as aplastic anemia), graft v. host disease, ischemic injury (such as that caused by myocardial infarction, stroke and reperfusion injury), liver injury (e.g., hepatitis related liver injury, ischemia/reperfusion injury, cholestosis (bile duct injury) and liver cancer); toxin-induced liver disease (such as that caused by alcohol), septic shock, cachexia and anorexia.

Wound Healing and Epithelial Cell Proliferation

[0804] In accordance with yet a further aspect of the present invention, there is provided a process for utilizing polynucleotides or polypeptides, as well as agonists or antagonists of the present invention, for therapeutic purposes, for example, to stimulate epithelial cell proliferation and basal keratinocytes for the purpose of wound healing, and to stimulate hair follicle production and healing of dermal wounds. Polynucleotides or polypeptides, as well as agonists or antagonists of the present invention, may be clinically useful in stimulating wound healing including surgical wounds, excisional wounds, deep wounds involving damage of the dermis and epidermis, eye tissue wounds, dental tissue wounds, oral cavity wounds, diabetic ulcers, dermal ulcers, cubitus ulcers, arterial ulcers, venous stasis ulcers, burns resulting from heat exposure or chemicals, and other abnormal wound healing conditions such as uremia, malnutrition, vitamin deficiencies and complications associated with systemic treatment with steroids, radiation therapy and antineoplastic S drugs and antimetabolites. Polynucleotides or polypeptides, as well as agonists or antagonists of the present invention, could be used to promote dermal reestablishment subsequent to dermal loss.

[0805] Polynucleotides or polypeptides, as well as agonists or antagonists of the present invention, could be used to increase the adherence of skin grafts to a wound bed and to stimulate re-epithelialization from the wound bed. The following are types of grafts that polynucleotides or polypeptides, agonists or antagonists of the present invention, could be used to increase adherence to a wound bed: autografts, artificial skin, allografts, autoderrnic graft, autoepdermic grafts, avacular grafts, Blair-Brown grafts, bone graft, brephoplastic grafts, cutis graft, delayed graft, dermic graft, epidermic graft, fascia graft, full thickness graft, heterologous graft, xenograft, homologous graft, hyperplastic graft, lamellar graft, mesh graft, mucosal graft, Ollier-Thiersch graft, omenpal graft, patch graft, pedicle graft, penetrating graft, split skin graft, thick split graft. Polynucleotides or polypeptides, as well as agonists or antagonists of the present invention, can be used to promote skin strength and to improve the appearance of aged skin.

[0806] It is believed that polynucleotides or polypeptides, as well as agonists or antagonists of the present invention, will also produce changes in hepatocyte proliferation, and epithelial cell proliferation in the lung, breast, pancreas, stomach, small intestine, and large intestine. Polynucleotides or polypeptides, as well as agonists or antagonists of the present invention, could promote proliferation of epithelial cells such as sebocytes, hair follicles, hepatocytes, type II pneumocytes, mucin-producing goblet cells, and other epithelial cells and their progenitors contained within the skin, lung, liver, and gastrointestinal tract. Polynucleotides or polypeptides, agonists or antagonists of the present invention, may promote proliferation of endothelial cells, keratinocytes, and basal keratinocytes.

[0807] Polynucleotides or polypeptides, as well as agonists or antagonists of the present invention, could also be used to reduce the side effects of gut toxicity that result from radiation, chemotherapy treatments or viral infections. Polynucleotides or polypeptides, as well as agonists or antagonists of the present invention, may have a cytoprotective effect on the small intestine mucosa. Polynucleotides or polypeptides, as well as agonists or antagonists of the present invention, may also stimulate healing of mucositis (mouth ulcers) that result from chemotherapy and viral infections.

[0808] Polynucleotides or polypeptides, as well as agonists or antagonists of the present invention, could further be used in full regeneration of skin in full and partial thickness skin defects, including burns, (i.e., repopulation of hair follicles, sweat glands, and sebaceous glands), treatment of other skin defects such as psoriasis. Polynucleotides or polypeptides, as well as agonists or antagonists of the present invention, could be used to treat epidermolysis bullosa, a defect in adherence of the epidermis to the underlying dermis which results in frequent, open and painful blisters by accelerating reepithelialization of these lesions. Polynucleotides or polypeptides, as well as agonists or antagonists of the present invention, could also be used to treat gastric and doudenal ulcers and help heal by scar formation of the mucosal lining and regeneration of glandular mucosa and duodenal mucosal lining more rapidly. Inflammatory bowel diseases, such as Crohn's disease and ulcerative colitis, are diseases which result in destruction of the mucosal surface of the small or large intestine, respectively. Thus, polynucleotides or polypeptides, as well as agonists or antagonists of the present invention, could be used to promote the resurfacing of the mucosal surface to aid more rapid healing and to prevent progression of inflammatory bowel disease. Treatment with polynucleotides or polypeptides, agonists or antagonists of the present invention, is expected to have a significant effect on the production of mucus throughout the gastrointestinal tract and could be used to protect the intestinal mucosa from injurious substances that are ingested or following surgery. Polynucleotides or polypeptides, as well as agonists or antagonists of the present invention, could be used to treat diseases associate with the under expression.

[0809] Moreover, polynucleotides or polypeptides, as well as agonists or antagonists of the present invention, could be used to prevent and heal damage to the lungs due to various pathological states. Polynucleotides or polypeptides, as well as agonists or antagonists of the present invention, which could stimulate proliferation and differentiation and promote the repair of alveoli and brochiolar epithelium to prevent or treat acute or chronic lung damage. For example, emphysema, which results in the progressive loss of aveoli, and inhalation injuries, i.e., resulting from smoke inhalation and bums, that cause necrosis of the bronchiolar epithelium and alveoli could be effectively treated using polynucleotides or polypeptides, agonists or antagonists of the present invention. Also, polynucleotides or polypeptides, as well as agonists or antagonists of the present invention, could be used to stimulate the proliferation of and differentiation of type II pneumocytes, which may help treat or prevent disease such as hyaline membrane diseases, such as infant respiratory distress syndrome and bronchopulmonary displasia, in premature infants.

[0810] Polynucleotides or polypeptides, as well as agonists or antagonists of the present invention, could stimulate the proliferation and differentiation of hepatocytes and, thus, could be used to alleviate or treat liver diseases and pathologies such as fulminant liver failure caused by cirrhosis, liver damage caused by viral hepatitis and toxic substances (i.e., acetaminophen, carbon tetraholoride and other hepatotoxins known in the art).

[0811] In addition, polynucleotides or polypeptides, as well as agonists or antagonists of the present invention, could be used treat or prevent the onset of diabetes mellitus. In patients with newly diagnosed Types I and II diabetes, where some islet cell function remains, polynucleotides or polypeptides, as well as agonists or antagonists of the present invention, could be used to maintain the islet function so as to alleviate, delay or prevent permanent manifestation of the disease. Also, polynucleotides or polypeptides, as well as agonists or antagonists of the present invention, could be used as an auxiliary in islet cell transplantation to improve or promote islet cell function.

Neural Activity and Neurological Diseases

[0812] The polynucleotides, polypeptides and agonists or antagonists of the invention may be used for the diagnosis and/or treatment of diseases, disorders, damage or injury of the brain and/or nervous system. Nervous system disorders that can be treated with the compositions of the invention (e.g., polypeptides, polynucleotides, and/or agonists or antagonists), include, but are not limited to, nervous system injuries, and diseases or disorders which result in either a disconnection of axons, a diminution or degeneration of neurons, or demyelination. Nervous system lesions which may be treated in a patient (including human and non-human mammalian patients) according to the methods of the invention, include but are not limited to, the following lesions of either the central (including spinal cord, brain) or peripheral nervous systems: (1) ischemic lesions, in which a lack of oxygen in a portion of the nervous system results in neuronal injury or death, including cerebral infarction or ischemia, or spinal cord infarction or ischemia; (2) traumatic lesions, including lesions caused by physical injury or associated with surgery, for example, lesions which sever a portion of the nervous system, or compression injuries; (3) malignant lesions, in which a portion of the nervous system is destroyed or injured by malignant tissue which is either a nervous system associated malignancy or a malignancy derived from non-nervous system tissue; (4) infectious lesions, in which a portion of the nervous system is destroyed or injured as a result of infection, for example, by an abscess or associated with infection by human immunodeficiency virus, herpes zoster, or herpes simplex virus or with Lyme disease, tuberculosis, or syphilis; (5) degenerative lesions, in which a portion of the nervous system is destroyed or injured as a result of a degenerative process including but not limited to, degeneration associated with Parkinson's disease, Alzheimer's disease, Huntington's chorea, or amyotrophic lateral sclerosis (ALS); (6) lesions associated with nutritional diseases or disorders, in which a portion of the nervous system is destroyed or injured by a nutritional disorder or disorder of metabolism including, but not limited to, vitamin B12 deficiency, folic acid deficiency, Wernicke disease, tobacco-alcohol amblyopia, Marchiafava-Bignami disease (primary degeneration of the corpus callosum), and alcoholic cerebellar degeneration; (7) neurological lesions associated with systemic diseases including, but not limited to, diabetes (diabetic neuropathy, Bell's palsy), systemic lupus erythematosus, carcinoma, or sarcoidosis; (8) lesions caused by toxic substances including alcohol, lead, or particular neurotoxins; and (9) demyelinated lesions in which a portion of the nervous system is destroyed or injured by a demyelinating disease including, but not limited to, multiple sclerosis, human immunodeficiency virus-associated myelopathy, transverse myelopathy or various etiologies, progressive multifocal leukoencephalopathy, and central pontine myelinolysis.

[0813] In one embodiment, the polypeptides, polynucleotides, or agonists or antagonists of the invention are used to protect neural cells from the damaging effects of hypoxia. In a further preferred embodiment, the polypeptides, polynucleotides, or agonists or antagonists of the invention are used to protect neural cells from the damaging effects of cerebral hypoxia. According to this embodiment, the compositions of the invention are used to treat or prevent neural cell injury associated with cerebral hypoxia. In one non-exclusive aspect of this embodiment, the polypeptides, polynucleotides, or agonists or antagonists of the invention, are used to treat or prevent neural cell injury associated with cerebral ischemia. In another non-exclusive aspect of this embodiment, the polypeptides, polynucleotides, or agonists or antagonists of the invention are used to treat or prevent neural cell injury associated with cerebral infarction.

[0814] In another preferred embodiment, the polypeptides, polynucleotides, or agonists or antagonists of the invention are used to treat or prevent neural cell injury associated with a stroke. In a specific embodiment, the polypeptides, polynucleotides, or agonists or antagonists of the invention are used to treat or prevent cerebral neural cell injury associated with a stroke.

[0815] In another preferred embodiment, the polypeptides, polynucleotides, or agonists or antagonists of the invention are used to treat or prevent neural cell injury associated with a heart attack. In a specific embodiment, the polypeptides, polynucleotides, or agonists or antagonists of the invention are used to treat or prevent cerebral neural cell injury associated with a heart attack.

[0816] The compositions of the invention which are useful for treating or preventing a nervous system disorder may be selected by testing for biological activity in promoting the survival or differentiation of neurons. For example, and not by way of limitation, compositions of the invention which elicit any of the following effects may be useful according to the invention: (1) increased survival time of neurons in culture either in the presence or absence of hypoxia or hypoxic conditions; (2) increased sprouting of neurons in culture or in vivo; (3) increased production of a neuron-associated molecule in culture or in vivo, e.g., choline acetyltransferase or acetylcholinesterase with respect to motor neurons; or (4) decreased symptoms of neuron dysfunction in vivo. Such effects may be measured by any method known in the art. In preferred, non-limiting embodiments, increased survival of neurons may routinely be measured using a method set forth herein or otherwise known in the art, such as, for example, in Zhang et al., Proc Natl Acad Sci USA 97:3637-42 (2000) or in Arakawa et al., J. Neurosci., 10:3507-15 (1990); increased sprouting of neurons may be detected by methods known in the art, such as, for example, the methods set forth in Pestronk et al., Exp. Neurol., 70:65-82 (1980), or Brown et al., Ann. Rev. Neurosci., 4:17-42 (1981); increased production of neuron-associated molecules may be measured by bioassay, enzymatic assay, antibody binding, Northern blot assay, etc., using techniques known in the art and depending on the molecule to be measured; and motor neuron dysfunction may be measured by assessing the physical manifestation of motor neuron disorder, e.g., weakness, motor neuron conduction velocity, or functional disability.

[0817] In specific embodiments, motor neuron disorders that may be treated according to the invention include, but are not limited to, disorders such as infarction, infection, exposure to toxin, trauma, surgical damage, degenerative disease or malignancy that may affect motor neurons as well as other components of the nervous system, as well as disorders that selectively affect neurons such as amyotrophic lateral sclerosis, and including, but not limited to, progressive spinal muscular atrophy, progressive bulbar palsy, primary lateral sclerosis, infantile and juvenile muscular atrophy, progressive bulbar paralysis of childhood (Fazio-Londe syndrome), poliomyelitis and the post polio syndrome, and Hereditary Motorsensory Neuropathy (Charcot-Marie-Tooth Disease).

[0818] Further, polypeptides or polynucleotides of the invention may play a role in neuronal survival; synapse formation; conductance; neural differentiation, etc. Thus, compositions of the invention (including polynucleotides, polypeptides, and agonists or antagonists) may be used to diagnose and/or treat or prevent diseases or disorders associated with these roles, including, but not limited to, learning and/or cognition disorders. The compositions of the invention may also be useful in the treatment or prevention of neurodegenerative disease states and/or behavioural disorders. Such neurodegenerative disease states and/or behavioral disorders include, but are not limited to, Alzheimer's Disease, Parkinson's Disease, Huntington's Disease, Tourette Syndrome, schizophrenia, mania, dementia, paranoia, obsessive compulsive disorder, panic disorder, learning disabilities, ALS, psychoses, autism, and altered behaviors, including disorders in feeding, sleep patterns, balance, and perception. In addition, compositions of the invention may also play a role in the treatment, prevention and/or detection of developmental disorders associated with the developing embryo, or sexually-linked disorders.

[0819] Additionally, polypeptides, polynucleotides and/or agonists or antagonists of the invention, may be useful in protecting neural cells from diseases, damage, disorders, or injury, associated with cerebrovascular disorders including, but not limited to, carotid artery diseases (e.g., carotid artery thrombosis, carotid stenosis, or Moyamoya Disease), cerebral amyloid angiopathy, cerebral aneurysm, cerebral anoxia, cerebral arteriosclerosis, cerebral arteriovenous malformations, cerebral artery diseases, cerebral embolism and thrombosis (e.g., carotid artery thrombosis, sinus thrombosis, or Wallenberg's Syndrome), cerebral hemorrhage (e.g., epidural or subdural hematoma, or subarachnoid hemorrhage), cerebral infarction, cerebral ischemia (e.g., transient cerebral ischemia, Subclavian Steal Syndrome, or vertebrobasilar insufficiency), vascular dementia (e.g., multi-infarct), leukomalacia, periventricular, and vascular headache (e.g., cluster headache or migraines).

[0820] In accordance with yet a further aspect of the present invention, there is provided a process for utilizing polynucleotides or polypeptides, as well as agonists or antagonists of the present invention, for therapeutic purposes, for example, to stimulate neurological cell proliferation and/or differentiation. Therefore, polynucleotides, polypeptides, agonists and/or antagonists of the invention may be used to treat and/or detect neurologic diseases. Moreover, polynucleotides or polypeptides, or agonists or antagonists of the invention, can be used as a marker or detector of a particular nervous system disease or disorder.

[0821] Examples of neurologic diseases which can be treated or detected with polynucleotides, polypeptides, agonists, and/or antagonists of the present invention include brain diseases, such as metabolic brain diseases which includes phenylketonuria such as maternal phenylketonuria, pyruvate carboxylase deficiency, pyruvate dehydrogenase complex deficiency, Wernicke's Encephalopathy, brain edema, brain neoplasms such as cerebellar neoplasms which include infratentorial neoplasms, cerebral ventricle neoplasms such as choroid plexus neoplasms, hypothalamic neoplasms, supratentorial neoplasms, canavan disease, cerebellar diseases such as cerebellar ataxia which include spinocerebellar degeneration such as ataxia telangiectasia, cerebellar dyssynergia, Friederich's Ataxia, Machado-Joseph Disease, olivopontocerebellar atrophy, cerebellar neoplasms such as infratentorial neoplasms, diffuse cerebral sclerosis such as encephalitis periaxialis, globoid cell leukodystrophy, metachromatic leukodystrophy and subacute sclerosing panencephalitis.

[0822] Additional neurologic diseases which can be treated or detected with polynucleotides, polypeptides, agonists, and/or antagonists of the present invention include cerebrovascular disorders (such as carotid artery diseases which include carotid artery thrombosis, carotid stenosis and Moyamoya Disease), cerebral amyloid angiopathy, cerebral aneurysm, cerebral anoxia, cerebral arteriosclerosis, cerebral arteriovenous malformations, cerebral artery diseases, cerebral embolism and thrombosis such as carotid artery thrombosis, sinus thrombosis and Wallenberg's Syndrome, cerebral hemorrhage such as epidural hematoma, subdural hematoma and subarachnoid hemorrhage, cerebral infarction, cerebral ischemia such as transient cerebral ischemia, Subclavian Steal Syndrome and vertebrobasilar insufficiency, vascular dementia such as multi-infarct dementia, periventricular leukomalacia, vascular headache such as cluster headache and migraine.

[0823] Additional neurologic diseases which can be treated or detected with polynucleotides, polypeptides, agonists, and/or antagonists of the present invention include dementia such as AIDS Dementia Complex, presenile dementia such as Alzheimer's Disease and Creutzfeldt-Jakob Syndrome, senile dementia such as Alzheimer's Disease and progressive supranuclear palsy, vascular dementia such as multi-infarct dementia, encephalitis which include encephalitis periaxialis, viral encephalitis such as epidemic encephalitis, Japanese Encephalitis, St. Louis Encephalitis, tick-borne encephalitis and West Nile Fever, acute disseminated encephalomyelitis, meningoencephalitis such as uveomeningoencephalitic syndrome, Postencephalitic Parkinson Disease and subacute sclerosing panencephalitis, encephalomalacia such as periventricular leukomalacia, epilepsy such as generalized epilepsy which includes infantile spasms, absence epilepsy, myoclonic epilepsy which includes MERRF Syndrome, tonic-clonic epilepsy, partial epilepsy such as complex partial epilepsy, frontal lobe epilepsy and temporal lobe epilepsy, post-traumatic epilepsy, status epilepticus such as Epilepsia Partialis Continua, and Hallervorden-Spatz Syndrome.

[0824] Additional neurologic diseases which can be treated or detected with polynucleotides, polypeptides, agonists, and/or antagonists of the present invention include hydrocephalus such as Dandy-Walker Syndrome and normal pressure hydrocephalus, hypothalamic diseases such as hypothalamic neoplasms, cerebral malaria, narcolepsy which includes cataplexy, bulbar poliomyelitis, cerebri pseudotumor, Rett Syndrome, Reye's Syndrome, thalamic diseases, cerebral toxoplasmosis, intracranial tuberculoma and Zellweger Syndrome, central nervous system infections such as AIDS Dementia Complex, Brain Abscess, subdural empyema, encephalomyelitis such as Equine Encephalomyelitis, Venezuelan Equine Encephalomyelitis, Necrotizing Hemorrhagic Encephalomyelitis, Visna, and cerebral malaria.

[0825] Additional neurologic diseases which can be treated or detected with polynucleotides, polypeptides, agonists, and/or antagonists of the present invention include meningitis such as arachnoiditis, aseptic meningtitis such as viral meningtitis which includes lymphocytic choriomeningitis, Bacterial meningtitis which includes Haemophilus Meningtitis, Listeria Meningtitis, Meningococcal Meningtitis such as Waterhouse-Friderichsen Syndrome, Pneumococcal Meningtitis and meningeal tuberculosis, fungal meningitis such as Cryptococcal Meningtitis, subdural effusion, meningoencephalitis such as uvemeningoencephalitic syndrome, myelitis such as transverse myelitis, neurosyphilis such as tabes dorsalis, poliomyelitis which includes bulbar poliomyelitis and postpoliomyelitis syndrome, prion diseases (such as Creutzfeldt-Jakob Syndrome, Bovine Spongiform Encephalopathy, Gerstmann-Straussler Syndrome, Kuru, Scrapie), and cerebral toxoplasmosis.

[0826] Additional neurologic diseases which can be treated or detected with polynucleotides, polypeptides, agonists, and/or antagonists of the present invention include central nervous system neoplasms such as brain neoplasms that include cerebellar neoplasms such as infratentorial neoplasms, cerebral ventricle neoplasms such as choroid plexus neoplasms, hypothalamic neoplasms and supratentorial neoplasms, meningeal neoplasms, spinal cord neoplasms which include epidural neoplasms, demyelinating diseases such as Canavan Diseases, diffuse cerebral sceloris which includes adrenoleukodystrophy, encephalitis periaxialis, globoid cell leukodystrophy, diffuse cerebral sclerosis such as metachromatic leukodystrophy, allergic encephalomyelitis, necrotizing hemorrhagic encephalomyelitis, progressive multifocal leukoencephalopathy, multiple sclerosis, central pontine myelinolysis, transverse myelitis, neuromyelitis optica, Scrapie, Swayback, Chronic Fatigue Syndrome, Visna, High Pressure Nervous Syndrome, Meningism, spinal cord diseases such as amyotonia congenita, amyotrophic lateral sclerosis, spinal muscular atrophy such as Werdnig-Hoffmann Disease, spinal cord compression, spinal cord neoplasms such as epidural neoplasms, syringomyelia, Tabes Dorsalis, Stiff-Man Syndrome, mental retardation such as Angelman Syndrome, Cri-du-Chat Syndrome, De Lange's Syndrome, Down Syndrome, Gangliosidoses such as gangliosidoses G(M1), Sandhoff Disease, Tay-Sachs Disease, Hartnup Disease, homocystinuria, Laurence-Moon-Biedl Syndrome, Lesch-Nyhan Syndrome, Maple Syrup Urine Disease, mucolipidosis such as fucosidosis, neuronal ceroid-lipofuscinosis, oculocerebrorenal syndrome, phenylketonuria such as maternal phenylketonuria, Prader-Willi Syndrome, Rett Syndrome, Rubinstein-Taybi Syndrome, Tuberous Sclerosis, WAGR Syndrome, nervous system abnormalities such as holoprosencephaly, neural tube defects such as anencephaly which includes hydrangencephaly, Arnold-Chairi Deformity, encephalocele, meningocele, meningomyelocele, spinal dysraphism such as spina bifida cystica and spina bifida occulta.

[0827] Additional neurologic diseases which can be treated or detected with polynucleotides, polypeptides, agonists, and/or antagonists of the present invention include hereditary motor and sensory neuropathies which include Charcot-Marie Disease, Hereditary optic atrophy, Refsum's Disease, hereditary spastic paraplegia, Werdnig-Hoffmann Disease, Hereditary Sensory and Autonomic Neuropathies such as Congenital Analgesia and Familial Dysautonomia, Neurologic manifestations (such as agnosia that include Gerstmann's Syndrome, Amnesia such as retrograde amnesia, apraxia, neurogenic bladder, cataplexy, communicative disorders such as hearing disorders that includes deafness, partial hearing loss, loudness recruitment and tinnitus, language disorders such as aphasia which include agraphia, anomia, broca aphasia, and Wernicke Aphasia, Dyslexia such as Acquired Dyslexia, language development disorders, speech disorders such as aphasia which includes anomia, broca aphasia and Wernicke Aphasia, articulation disorders, communicative disorders such as speech disorders which include dysarthria, echolalia, mutism and stuttering, voice disorders such as aphonia and hoarseness, decerebrate state, delirium, fasciculation, hallucinations, meningism, movement disorders such as angelman syndrome, ataxia, athetosis, chorea, dystonia, hypokinesia, muscle hypotonia, myoclonus, tic, torticollis and tremor, muscle hypertonia such as muscle rigidity such as stiff-man syndrome, muscle spasticity, paralysis such as facial paralysis which includes Herpes Zoster Oticus, Gastroparesis, Hemiplegia, ophthalmoplegia such as diplopia, Duane's Syndrome, Horner's Syndrome, Chronic progressive external ophthalmoplegia such as Kearns Syndrome, Bulbar Paralysis, Tropical Spastic Paraparesis, Paraplegia such as Brown-Sequard Syndrome, quadriplegia, respiratory paralysis and vocal cord paralysis, paresis, phantom limb, taste disorders such as ageusia and dysgeusia, vision disorders such as amblyopia, blindness, color vision defects, diplopia, hemianopsia, scotoma and subnormal vision, sleep disorders such as hypersomnia which includes Kleine-Levin Syndrome, insomnia, and somnambulism, spasm such as trismus, unconsciousness such as coma, persistent vegetative state and syncope and vertigo, neuromuscular diseases such as amyotonia congenita, amyotrophic lateral sclerosis, Lambert-Eaton Myasthenic Syndrome, motor neuron disease, muscular atrophy such as spinal muscular atrophy, Charcot-Marie Disease and Werdnig-Hoffmann Disease, Postpoliomyelitis Syndrome, Muscular Dystrophy, Myasthenia Gravis, Myotonia Atrophica, Myotonia Confenita, Nemaline Myopathy, Familial Periodic Paralysis, Multiplex Paramyloclonus, Tropical Spastic Paraparesis and Stiff-Man Syndrome, peripheral nervous system diseases such as acrodynia, amyloid neuropathies, autonomic nervous system diseases such as Adie's Syndrome, Barre-Lieou Syndrome, Familial Dysautonomia, Horner's Syndrome, Reflex Sympathetic Dystrophy and Shy-Drager Syndrome, Cranial Nerve Diseases such as Acoustic Nerve Diseases such as Acoustic Neuroma which includes Neurofibromatosis 2, Facial Nerve Diseases such as Facial Neuralgia, Melkersson-Rosenthal Syndrome, ocular motility disorders which includes amblyopia, nystagmus, oculomotor nerve paralysis, ophthalmoplegia such as Duane's Syndrome, Horner's Syndrome, Chronic Progressive External Ophthalmoplegia which includes Kearns Syndrome, Strabismus such as Esotropia and Exotropia, Oculomotor Nerve Paralysis, Optic Nerve Diseases such as Optic Atrophy which includes Hereditary Optic Atrophy, Optic Disk Drusen, Optic Neuritis such as Neuromyelitis Optica, Papilledema, Trigeminal Neuralgia, Vocal Cord Paralysis, Demyelinating Diseases such as Neuromyelitis Optica and Swayback, and Diabetic neuropathies such as diabetic foot.

[0828] Additional neurologic diseases which can be treated or detected with polynucleotides, polypeptides, agonists, and/or antagonists of the present invention include nerve compression syndromes such as carpal tunnel syndrome, tarsal tunnel syndrome, thoracic outlet syndrome such as cervical rib syndrome, ulnar nerve compression syndrome, neuralgia such as causalgia, cervico-brachial neuralgia, facial neuralgia and trigeminal neuralgia, neuritis such as experimental allergic neuritis, optic neuritis, polyneuritis, polyradiculoneuritis and radiculities such as polyradiculitis, hereditary motor and sensory neuropathies such as Charcot-Marie Disease, Hereditary Optic Atrophy, Refsum's Disease, Hereditary Spastic Paraplegia and Werdnig-Hoffmann Disease, Hereditary Sensory and Autonomic Neuropathies which include Congenital Analgesia and Familial Dysautonomia, POEMS Syndrome, Sciatica, Gustatory Sweating and Tetany).

Endocrine Disorders

[0829] Polynucleotides or polypeptides, or agonists or antagonists of the present invention, may be used to treat, prevent, diagnose, and/or prognose disorders and/or diseases related to hormone imbalance, and/or disorders or diseases of the endocrine system.

[0830] Hormones secreted by the glands of the endocrine system control physical growth, sexual function, metabolism, and other functions. Disorders may be classified in two ways: disturbances in the production of hormones, and the inability of tissues to respond to hormones. The etiology of these hormone imbalance or endocrine system diseases, disorders or conditions may be genetic, somatic, such as cancer and some autoimmune diseases, acquired (e.g., by chemotherapy, injury or toxins), or infectious. Moreover, polynucleotides, polypeptides, antibodies, and/or agonists or antagonists of the present invention can be used as a marker or detector of a particular disease or disorder related to the endocrine system and/or hormone imbalance.

[0831] Endocrine system and/or hormone imbalance and/or diseases encompass disorders of uterine motility including, but not limited to: complications with pregnancy and labor (e.g., pre-term labor, post-term pregnancy, spontaneous abortion, and slow or stopped labor); and disorders and/or diseases of the menstrual cycle (e.g., dysmenorrhea and endometriosis).

[0832] Endocrine system and/or hormone imbalance disorders and/or diseases include disorders and/or diseases of the pancreas, such as, for example, diabetes mellitus, diabetes insipidus, congenital pancreatic agenesis, pheochromocytoma—islet cell tumor syndrome; disorders and/or diseases of the adrenal glands such as, for example, Addison's Disease, corticosteroid deficiency, virilizing disease, hirsutism, Cushing's Syndrome, hyperaldosteronism, pheochromocytoma; disorders and/or diseases of the pituitary gland, such as, for example, hyperpituitarism, hypopituitarism, pituitary dwarfism, pituitary adenoma, panhypopituitarism, acromegaly, gigantism; disorders and/or diseases of the thyroid, including but not limited to, hyperthyroidism, hypothyroidism, Plummer's disease, Graves' disease (toxic diffuse goiter), toxic nodular goiter, thyroiditis (Hashimoto's thyroiditis, subacute granulomatous thyroiditis, and silent lymphocytic thyroiditis), Pendred's syndrome, myxedema, cretinism, thyrotoxicosis, thyroid hormone coupling defect, thymic aplasia, Hurthle cell tumours of the thyroid, thyroid cancer, thyroid carcinoma, Medullary thyroid carcinoma; disorders and/or diseases of the parathyroid, such as, for example, hyperparathyroidism, hypoparathyroidism; disorders and/or diseases of the hypothalamus.

[0833] In specific embodiments, the polynucleotides and/or polypeptides corresponding to this gene and/or agonists or antagonists of those polypeptides (including antibodies) as well as fragments and variants of those polynucleotides, polypeptides, agonists and antagonists, may be used to diagnose, prognose, treat, prevent, or ameliorate diseases and disorders associated with aberrant glucose metabolism or glucose uptake into cells.

[0834] In a specific embodiment, the polynucleotides and/or polypeptides corresponding to this gene and/or agonists and/or antagonists thereof may be used to diagnose, prognose, treat, prevent, and/or ameliorate type I diabetes mellitus (insulin dependent diabetes mellitus, IDDM).

[0835] In another embodiment, the polynucleotides and/or polypeptides corresponding to this gene and/or agonists and/or antagonists thereof may be used to diagnose, prognose, treat, prevent, and/or ameliorate type II diabetes mellitus (insulin resistant diabetes mellitus).

[0836] Additionally, in other embodiments, the polynucleotides and/or polypeptides corresponding to this gene and/or antagonists thereof (especially neutralizing or antagonistic antibodies) may be used to diagnose, prognose, treat, prevent, and/or ameliorate conditions associated with (type I or type II) diabetes mellitus, including, but not limited to, diabetic ketoacidosis, diabetic coma, nonketotic hyperglycemic-hyperosmolar coma, seizures, mental confusion, drowsiness, cardiovascular disease (e.g., heart disease, atherosclerosis, microvascular disease, hypertension, stroke, and other diseases and disorders as described in the “Cardiovascular Disorders” section), dyslipidemia, kidney disease (e.g., renal failure, nephropathy other diseases and disorders as described in the “Renal Disorders” section), nerve damage, neuropathy, vision impairment (e.g., diabetic retinopathy and blindness), ulcers and impaired wound healing, infections (e.g., infectious diseases and disorders as described in the “Infectious Diseases” section, especially of the urinary tract and skin), carpal tunnel syndrome and Dupuytren's contracture.

[0837] In other embodiments, the polynucleotides and/or polypeptides corresponding to this gene and/or agonists or antagonists thereof are administered to an animal, preferably a mammal, and most preferably a human, in order to regulate the animal's weight. In specific embodiments the polynucleotides and/or polypeptides corresponding to this gene and/or agonists or antagonists thereof are administered to an animal, preferably a mammal, and most preferably a human, in order to control the animal's weight by modulating a biochemical pathway involving insulin. In still other embodiments the polynucleotides and/or polypeptides corresponding to this gene and/or agonists or antagonists thereof are administered to an animal, preferably a mammal, and most preferably a human, in order to control the animal's weight by modulating a biochemical pathway involving insulin-like growth factor.

[0838] In addition, endocrine system and/or hormone imbalance disorders and/or diseases may also include disorders and/or diseases of the testes or ovaries, including cancer. Other disorders and/or diseases of the testes or ovaries further include, for example, ovarian cancer, polycystic ovary syndrome, Klinefelter's syndrome, vanishing testes syndrome (bilateral anorchia), congenital absence of Leydig's cells, cryptorchidism, Noonan's syndrome, myotonic dystrophy, capillary haemangioma of the testis (benign), neoplasias of the testis and neo-testis.

[0839] Moreover, endocrine system and/or hormone imbalance disorders and/or diseases may also include disorders and/or diseases such as, for example, polyglandular deficiency syndromes, pheochromocytoma, neuroblastoma, multiple Endocrine neoplasia, and disorders and/or cancers of endocrine tissues.

[0840] In another embodiment, a polypeptide of the invention, or polynucleotides, antibodies, agonists, or antagonists corresponding to that polypeptide, may be used to diagnose, prognose, prevent, and/or treat endocrine diseases and/or disorders associated with the tissue(s) in which the polypeptide of the invention is expressed, including one, two, three, four, five, or more tissues disclosed in Table 1B, column 8 (Tissue Distribution Library Code).

Reproductive System Disorders

[0841] The polynucleotides or polypeptides, or agonists or antagonists of the invention may be used for the diagnosis, treatment, or prevention of diseases and/or disorders of the reproductive system. Reproductive system disorders that can be treated by the compositions of the invention, include, but are not limited to, reproductive system injuries, infections, neoplastic disorders, congenital defects, and diseases or disorders which result in infertility, complications with pregnancy, labor, or parturition, and postpartum difficulties.

[0842] Reproductive system disorders and/or diseases include diseases and/or disorders of the testes, including testicular atrophy, testicular feminization, cryptorchism (unilateral and bilateral), anorchia, ectopic testis, epididymitis and orchitis (typically resulting from infections such as, for example, gonorrhea, mumps, tuberculosis, and syphilis), testicular torsion, vasitis nodosa, germ cell tumors (e.g., seminomas, embryonal cell carcinomas, teratocarcinomas, choriocarcinomas, yolk sac tumors, and teratomas), stromal tumors (e.g., Leydig cell tumors), hydrocele, hematocele, varicocele, spermatocele, inguinal hernia, and disorders of sperm production (e.g., immotile cilia syndrome, aspermia, asthenozoospermia, azoospermia, oligospermia, and teratozoospermia).

[0843] Reproductive system disorders also include disorders of the prostate gland, such as acute non-bacterial prostatitis, chronic non-bacterial prostatitis, acute bacterial prostatitis, chronic bacterial prostatitis, prostatodystonia, prostatosis, granulomatous prostatitis, malacoplakia, benign prostatic hypertrophy or hyperplasia, and prostate neoplastic disorders, including adenocarcinomas, transitional cell carcinomas, ductal carcinomas, and squamous cell carcinomas.

[0844] Additionally, the compositions of the invention may be useful in the diagnosis, treatment, and/or prevention of disorders or diseases of the penis and urethra, including inflammatory disorders, such as balanoposthitis, balanitis xerotica obliterans, phimosis, paraphimosis, syphilis, herpes simplex virus, gonorrhea, non-gonococcal urethritis, chlamydia, mycoplasma, trichomonas, HIV, AIDS, Reiter's syndrome, condyloma acuminatum, condyloma latum, and pearly penile papules; urethral abnormalities, such as hypospadias, epispadias, and phimosis; premalignant lesions, including Erythroplasia of Queyrat, Bowen's disease, Bowenoid paplosis, giant condyloma of Buscke-Lowenstein, and varrucous carcinoma; penile cancers, including squamous cell carcinomas, carcinoma in situ, verrucous carcinoma, and disseminated penile carcinoma; urethral neoplastic disorders, including penile urethral carcinoma, bulbomembranous urethral carcinoma, and prostatic urethral carcinoma; and erectile disorders, such as priapism, Peyronie's disease, erectile dysfunction, and impotence.

[0845] Moreover, diseases and/or disorders of the vas deferens include vasculititis and CBAVD (congenital bilateral absence of the vas deferens); additionally, the polynucleotides, polypeptides, and agonists or antagonists of the present invention may be used in the diagnosis, treatment, and/or prevention of diseases and/or disorders of the seminal vesicles, including hydatid disease, congenital chloride diarrhea, and polycystic kidney disease.

[0846] Other disorders and/or diseases of the male reproductive system include, for example, Klinefelter's syndrome, Young's syndrome, premature ejaculation, diabetes mellitus, cystic fibrosis, Kartagener's syndrome, high fever, multiple sclerosis, and gynecomastia.

[0847] Further, the polynucleotides, polypeptides, and agonists or antagonists of the present invention may be used in the diagnosis, treatment, and/or prevention of diseases and/or disorders of the vagina and vulva, including bacterial vaginosis, candida vaginitis, herpes simplex virus, chancroid, granuloma inguinale, lymphogranuloma venereum, scabies, human papillomavirus, vaginal trauma, vulvar trauma, adenosis, chlamydia vaginitis, gonorrhea, trichomonas vaginitis, condyloma acuminatum, syphilis, molluscum contagiosum, atrophic vaginitis, Paget's disease, lichen sclerosus, lichen planus, vulvodynia, toxic shock syndrome, vaginismus, vulvovaginitis, vulvar vestibulitis, and neoplastic disorders, such as squamous cell hyperplasia, clear cell carcinoma, basal cell carcinoma, melanomas, cancer of Bartholin's gland, and vulvar intraepithelial neoplasia.

[0848] Disorders and/or diseases of the uterus include dysmenorrhea, retroverted uterus, endometriosis, fibroids, adenomyosis, anovulatory bleeding, amenorrhea, Cushing's syndrome, hydatidiform moles, Asherman's syndrome, premature menopause, precocious puberty, uterine polyps, dysfunctional uterine bleeding (e.g., due to aberrant hormonal signals), and neoplastic disorders, such as adenocarcinomas, keiomyosarcomas, and sarcomas. Additionally, the polypeptides, polynucleotides, or agonists or antagonists of the invention may be useful as a marker or detector of, as well as in the diagnosis, treatment, and/or prevention of congenital uterine abnormalities, such as bicornuate uterus, septate uterus, simple unicornuate uterus, unicornuate uterus with a noncavitary rudimentary horn, unicomuate uterus with a non-communicating cavitary rudimentary horn, unicornuate uterus with a communicating cavitary horn, arcuate uterus, uterine didelfus, and T-shaped uterus.

[0849] Ovarian diseases and/or disorders include anovulation, polycystic ovary syndrome (Stein-Leventhal syndrome), ovarian cysts, ovarian hypofunction, ovarian insensitivity to gonadotropins, ovarian overproduction of androgens, right ovarian vein syndrome, amenorrhea, hirutism, and ovarian cancer (including, but not limited to, primary and secondary cancerous growth, Sertoli-Leydig tumors, endometriod carcinoma of the ovary, ovarian papillary serous adenocarcinoma, ovarian mucinous adenocarcinoma, and Ovarian Krukenberg tumors).

[0850] Cervical diseases and/or disorders include cervicitis, chronic cervicitis, mucopurulent cervicitis, cervical dysplasia, cervical polyps, Nabothian cysts, cervical erosion, cervical incompetence, and cervical neoplasms (including, for example, cervical carcinoma, squamous metaplasia, squamous cell carcinoma, adenosquamous cell neoplasia, and columnar cell neoplasia).

[0851] Additionally, diseases and/or disorders of the reproductive system include disorders and/or diseases of pregnancy, including miscarriage and stillbirth, such as early abortion, late abortion, spontaneous abortion, induced abortion, therapeutic abortion, threatened abortion, missed abortion, incomplete abortion, complete abortion, habitual abortion, missed abortion, and septic abortion; ectopic pregnancy, anemia, Rh incompatibility, vaginal bleeding during pregnancy, gestational diabetes, intrauterine growth retardation, polyhydramnios, HELLP syndrome, abruptio placentae, placenta previa, hyperemesis, preeclampsia, eclampsia, herpes gestationis, and urticaria of pregnancy. Additionally, the polynucleotides, polypeptides, and agonists or antagonists of the present invention may be used in the diagnosis, treatment, and/or prevention of diseases that can complicate pregnancy, including heart disease, heart failure, rheumatic heart disease, congenital heart disease, mitral valve prolapse, high blood pressure, anemia, kidney disease, infectious disease (e.g., rubella, cytomegalovirus, toxoplasmosis, infectious hepatitis, chlamydia, HIV, AIDS, and genital herpes), diabetes mellitus, Graves' disease, thyroiditis, hypothyroidism, Hashimoto's thyroiditis, chronic active hepatitis, cirrhosis of the liver, primary biliary cirrhosis, asthma, systemic lupus eryematosis, rheumatoid arthritis, myasthenia gravis, idiopathic thrombocytopenic purpura, appendicitis, ovarian cysts, gallbladder disorders, and obstruction of the intestine.

[0852] Complications associated with labor and parturition include premature rupture of the membranes, pre-term labor, post-term pregnancy, postmaturity, labor that progresses too slowly, fetal distress (e.g., abnormal heart rate (fetal or maternal), breathing problems, and abnormal fetal position), shoulder dystocia, prolapsed umbilical cord, amniotic fluid embolism, and aberrant uterine bleeding.

[0853] Further, diseases and/or disorders of the postdelivery period, including endometritis, myometritis, parametritis, peritonitis, pelvic thrombophlebitis, pulmonary embolism, endotoxemia, pyelonephritis, saphenous thrombophlebitis, mastitis, cystitis, postpartum hemorrhage, and inverted uterus.

[0854] Other disorders and/or diseases of the female reproductive system that may be diagnosed, treated, and/or prevented by the polynucleotides, polypeptides, and agonists or antagonists of the present invention include, for example, Turner's syndrome, pseudohermaphroditism, premenstrual syndrome, pelvic inflammatory disease, pelvic congestion (vascular engorgement), frigidity, anorgasmia, dyspareunia, ruptured fallopian tube, and Mittelschmerz.

Infectious Disease

[0855] Polynucleotides or polypeptides, as well as agonists or antagonists of the present invention can be used to treat or detect infectious agents. For example, by increasing the immune response, particularly increasing the proliferation and differentiation of B and/or T cells, infectious diseases may be treated. The immune response may be increased by either enhancing an existing immune response, or by initiating a new immune response. Alternatively, polynucleotides or polypeptides, as well as agonists or antagonists of the present invention may also directly inhibit the infectious agent, without necessarily eliciting an immune response.

[0856] Viruses are one example of an infectious agent that can cause disease or symptoms that can be treated or detected by a polynucleotide or polypeptide and/or agonist or antagonist of the present invention. Examples of viruses, include, but are not limited to Examples of viruses, include, but are not limited to the following DNA and RNA viruses and viral families: Arbovirus, Adenoviridae, Arenaviridae, Arterivirus, Birnaviridae, Bunyaviridae, Caliciviridae, Circoviridae, Coronaviridae, Dengue, EBV, HIV, Flaviviridae, Hepadnaviridae (Hepatitis), Herpesviridae (such as, Cytomegalovirus, Herpes Simplex, Herpes Zoster), Mononegavirus (e.g., Paramyxoviridae, Morbillivirus, Rhabdoviridae), Orthomyxoviridae (e.g., Influenza A, Influenza B, and parainfluenza), Papiloma virus, Papovaviridae, Parvoviridae, Picornaviridae, Poxyiridae (such as Smallpox or Vaccinia), Reoviridae (e.g., Rotavirus), Retroviridae (HTLV-I, HTLV-II, Lentivirus), and Togaviridae (e.g., Rubivirus). Viruses falling within these families can cause a variety of diseases or symptoms, including, but not limited to: arthritis, bronchiollitis, respiratory syncytial virus, encephalitis, eye infections (e.g., conjunctivitis, keratitis), chronic fatigue syndrome, hepatitis (A, B, C, E, Chronic Active, Delta), Japanese B encephalitis, Junin, Chikungunya, Rift Valley fever, yellow fever, meningitis, opportunistic infections (e.g., AIDS), pneumonia, Burkitt's Lymphoma, chickenpox, hemorrhagic fever, Measles, Mumps, Parainfluenza, Rabies, the common cold, Polio, leukemia, Rubella, sexually transmitted diseases, skin diseases (e.g., Kaposi's, warts), and viremia. polynucleotides or polypeptides, or agonists or antagonists of the invention, can be used to treat or detect any of these symptoms or diseases. In specific embodiments, polynucleotides, polypeptides, or agonists or antagonists of the invention are used to treat: meningitis, Dengue, EBV, and/or hepatitis (e.g., hepatitis B). In an additional specific embodiment polynucleotides, polypeptides, or agonists or antagonists of the invention are used to treat patients nonresponsive to one or more other commercially available hepatitis vaccines. In a further specific embodiment polynucleotides, polypeptides, or agonists or antagonists of the invention are used to treat AIDS.

[0857] Similarly, bacterial and fungal agents that can cause disease or symptoms and that can be treated or detected by a polynucleotide or polypeptide and/or agonist or antagonist of the present invention include, but not limited to, the following Gram-Negative and Gram-positive bacteria, bacterial families, and fungi: Actinomyces (e.g., Norcardia), Acinetobacter, Cryptococcus neoformans, Aspergillus, Bacillaceae (e.g., Bacillus anthrasis), Bacteroides (e.g., Bacteroides fragilis), Blastomycosis, Bordetella, Borrelia (e.g., Borrelia burgdorferi), Brucella, Candidia, Campylobacter, Chlamydia, Clostridium (e.g., Clostridium botulinum, Clostridium dificile, Clostridium perfringens, Clostridium tetani), Coccidioides, Corynebacterium (e.g., Corynebacterium diptheriae), Cryptococcus, Dermatocycoses, E. coli (e.g., Enterotoxigenic E. coli and Enterohemorrhagic E. coli), Enterobacter (e.g. Enterobacter aerogenes), Enterobacteriaceae (Klebsiella, Salmonella (e.g., Salmonella typhi, Salmonella enteritidis, Salmonella typhi), Serratia, Yersinia, Shigella), Erysipelothrix, Haemophilus (e.g., Haemophilus influenza type B), Helicobacter, Legionella (e.g., Legionella pneumophila), Leptospira, Listeria (e.g., Listeria monocytogenes), Mycoplasma, Mycobacterium (e.g., Mycobacterium leprae and Mycobacterium tuberculosis), Vibrio (e.g., Vibrio cholerae), Neisseriaceae (e.g., Neisseria gonorrhea, Neisseria meningitidis), Pasteurellacea, Proteus, Pseudomonas (e.g., Pseudomonas aeruginosa), Rickettsiaceae, Spirochetes (e.g., Treponema spp., Leptospira spp., Borrelia spp.), Shigella spp., Staphylococcus (e.g., Staphylococcus aureus), Meningiococcus, Pneumococcus and Streptococcus (e.g., Streptococcus pneumoniae and Groups A, B, and C Streptococci), and Ureaplasmas. These bacterial, parasitic, and fungal families can cause diseases or symptoms, including, but not limited to: antibiotic-resistant infections, bacteremia, endocarditis, septicemia, eye infections (e.g., conjunctivitis), uveitis, tuberculosis, gingivitis, bacterial diarrhea, opportunistic infections (e.g., AIDS related infections), paronychia, prosthesis-related infections, dental caries, Reiter's Disease, respiratory tract infections, such as Whooping Cough or Empyema, sepsis, Lyme Disease, Cat-Scratch Disease, dysentery, paratyphoid fever, food poisoning, Legionella disease, chronic and acute inflammation, erythema, yeast infections, typhoid, pneumonia, gonorrhea, meningitis (e.g., mengitis types A and B), chlamydia, syphillis, diphtheria, leprosy, brucellosis, peptic ulcers, anthrax, spontaneous abortions, birth defects, pneumonia, lung infections, ear infections, deafness, blindness, lethargy, malaise, vomiting, chronic diarrhea, Crohn's disease, colitis, vaginosis, sterility, pelvic inflammatory diseases, candidiasis, paratuberculosis, tuberculosis, lupus, botulism, gangrene, tetanus, impetigo, Rheumatic Fever, Scarlet Fever, sexually transmitted diseases, skin diseases (e.g., cellulitis, dermatocycoses), toxemia, urinary tract infections, wound infections, noscomial infections. Polynucleotides or polypeptides, agonists or antagonists of the invention, can be used to treat or detect any of these symptoms or diseases. In specific embodiments, polynucleotides, polypeptides, agonists or antagonists of the invention are used to treat: tetanus, diptheria, botulism, and/or meningitis type B.

[0858] Moreover, parasitic agents causing disease or symptoms that can be treated, prevented, and/or diagnosed by a polynucleotide or polypeptide and/or agonist or antagonist of the present invention include, but not limited to, the following families or class: Amebiasis, Babesiosis, Coccidiosis, Cryptosporidiosis, Dientamoebiasis, Dourine, Ectoparasitic, Giardias, Helminthiasis, Leishmaniasis, Schistisoma, Theileriasis, Toxoplasmosis, Trypanosomiasis, and Trichomonas and Sporozoans (e.g., Plasmodium virax, Plasmodium falciparium, Plasmodium malariae and Plasmodium ovale). These parasites can cause a variety of diseases or symptoms, including, but not limited to: Scabies, Trombiculiasis, eye infections, intestinal disease (e.g., dysentery, giardiasis), liver disease, lung disease, opportunistic infections (e.g., AIDS related), malaria, pregnancy complications, and toxoplasmosis. polynucleotides or polypeptides, or agonists or antagonists of the invention, can be used to treat, prevent, and/or diagnose any of these symptoms or diseases. In specific embodiments, polynucleotides, polypeptides, or agonists or antagonists of the invention are used to treat, prevent, and/or diagnose malaria.

[0859] Polynucleotides or polypeptides, as well as agonists or antagonists of the present invention of the present invention could either be by administering an effective amount of a polypeptide to the patient, or by removing cells from the patient, supplying the cells with a polynucleotide of the present invention, and returning the engineered cells to the patient (ex vivo therapy). Moreover, the polypeptide or polynucleotide of the present invention can be used as an antigen in a vaccine to raise an immune response against infectious disease.

Regeneration

[0860] Polynucleotides or polypeptides, as well as agonists or antagonists of the present invention can be used to differentiate, proliferate, and attract cells, leading to the regeneration of tissues. (See, Science 276:59-87 (1997)). The regeneration of tissues could be used to repair, replace, or protect tissue damaged by congenital defects, trauma (wounds, burns, incisions, or ulcers), age, disease (e.g. osteoporosis, osteocarthritis, periodontal disease, liver failure), surgery, including cosmetic plastic surgery, fibrosis, reperfusion injury, or systemic cytokine damage.

[0861] Tissues that could be regenerated using the present invention include organs (e.g., pancreas, liver, intestine, kidney, skin, endothelium), muscle (smooth, skeletal or cardiac), vasculature (including vascular and lymphatics), nervous, hematopoietic, and skeletal (bone, cartilage, tendon, and ligament) tissue. Preferably, regeneration occurs without or decreased scarring. Regeneration also may include angiogenesis.

[0862] Moreover, polynucleotides or polypeptides, as well as agonists or antagonists of the present invention, may increase regeneration of tissues difficult to heal. For example, increased tendon/ligament regeneration would quicken recovery time after damage. Polynucleotides or polypeptides, as well as agonists or antagonists of the present invention could also be used prophylactically in an effort to avoid damage. Specific diseases that could be treated include of tendinitis, carpal tunnel syndrome, and other tendon or ligament defects. A further example of tissue regeneration of non-healing wounds includes pressure ulcers, ulcers associated with vascular insufficiency, surgical, and traumatic wounds.

[0863] Similarly, nerve and brain tissue could also be regenerated by using polynucleotides or polypeptides, as well as agonists or antagonists of the present invention, to proliferate and differentiate nerve cells. Diseases that could be treated using this method include central and peripheral nervous system diseases, neuropathies, or mechanical and traumatic disorders (e.g., spinal cord disorders, head trauma, cerebrovascular disease, and stoke). Specifically, diseases associated with peripheral nerve injuries, peripheral neuropathy (e.g., resulting from chemotherapy or other medical therapies), localized neuropathies, and central nervous system diseases (e.g., Alzheimer's disease, Parkinson's disease, Huntington's disease, amyotrophic lateral sclerosis, and Shy-Drager syndrome), could all be treated using the polynucleotides or polypeptides, as well as agonists or antagonists of the present invention.

Gastrointestinal Disorders

[0864] Polynucleotides or polypeptides, or agonists or antagonists of the present invention, may be used to treat, prevent, diagnose, and/or prognose gastrointestinal disorders, including inflammatory diseases and/or conditions, infections, cancers (e.g., intestinal neoplasms (carcinoid tumor of the small intestine, non-Hodgkin's lymphoma of the small intestine, small bowl lymphoma)), and ulcers, such as peptic ulcers.

[0865] Gastrointestinal disorders include dysphagia, odynophagia, inflammation of the esophagus, peptic esophagitis, gastric reflux, submucosal fibrosis and stricturing, Mallory-Weiss lesions, leiomyomas, lipomas, epidermal cancers, adeoncarcinomas, gastric retention disorders, gastroenteritis, gastric atrophy, gastric/stomach cancers, polyps of the stomach, autoimmune disorders such as pernicious anemia, pyloric stenosis, gastritis (bacterial, viral, eosinophilic, stress-induced, chronic erosive, atrophic, plasma cell, and Menetrier's), and peritoneal diseases (e.g., chyloperioneum, hemoperitoneum, mesenteric cyst, mesenteric lymphadenitis, mesenteric vascular occlusion, panniculitis, neoplasms, peritonitis, pneumoperitoneum, bubphrenic abscess,).

[0866] Gastrointestinal disorders also include disorders associated with the small intestine, such as malabsorption syndromes, distension, irritable bowel syndrome, sugar intolerance, celiac disease, duodenal ulcers, duodenitis, tropical sprue, Whipple's disease, intestinal lymphangiectasia, Crohn's disease, appendicitis, obstructions of the ileum, Meckel's diverticulum, multiple diverticula, failure of complete rotation of the small and large intestine, lymphoma, and bacterial and parasitic diseases (such as Traveler's diarrhea, typhoid and paratyphoid, cholera, infection by Roundworms (Ascariasis lumbricoides), Hookworms (Ancylostoma duodenale), Threadworms (Enterobius vermicularis), Tapeworms (Taenia saginata, Echinococcus granulosus, Diphyllobothrium spp., and T. solium).

[0867] Liver diseases and/or disorders include intrahepatic cholestasis (alagille syndrome, biliary liver cirrhosis), fatty liver (alcoholic fatty liver, reye syndrome), hepatic vein thrombosis, hepatolentricular degeneration, hepatomegaly, hepatopulmonary syndrome, hepatorenal syndrome, portal hypertension (esophageal and gastric varices), liver abscess (amebic liver abscess), liver cirrhosis (alcoholic, biliary and experimental), alcoholic liver diseases (fatty liver, hepatitis, cirrhosis), parasitic (hepatic echinococcosis, fascioliasis, amebic liver abscess), jaundice (hemolytic, hepatocellular, and cholestatic), cholestasis, portal hypertension, liver enlargement, ascites, hepatitis (alcoholic hepatitis, animal hepatitis, chronic hepatitis (autoimmune, hepatitis B, hepatitis C, hepatitis D, drug induced), toxic hepatitis, viral human hepatitis (hepatitis A, hepatitis B, hepatitis C, hepatitis D, hepatitis E), Wilson's disease, granulomatous hepatitis, secondary biliary cirrhosis, hepatic encephalopathy, portal hypertension, varices, hepatic encephalopathy, primary biliary cirrhosis, primary sclerosing cholangitis, hepatocellular adenoma, hemangiomas, bile stones, liver failure (hepatic encephalopathy, acute liver failure), and liver neoplasms (angiomyolipoma, calcified liver metastases, cystic liver metastases, epithelial tumors, fibrolamellar hepatocarcinoma, focal nodular hyperplasia, hepatic adenoma, hepatobiliary cystadenoma, hepatoblastoma, hepatocellular carcinoma, hepatoma, liver cancer, liver hemangioendothelioma, mesenchymal hamartoma, mesenchymal tumors of liver, nodular regenerative hyperplasia, benign liver tumors (Hepatic cysts [Simple cysts, Polycystic liver disease, Hepatobiliary cystadenoma, Choledochal cyst], Mesenchymal tumors [Mesenchymal hamartoma, Infantile hemangioendothelioma, Hemangioma, Peliosis hepatis, Lipomas, Inflammatory pseudotumor, Miscellaneous], Epithelial tumors [Bile duct epithelium (Bile duct hamartoma, Bile duct adenoma), Hepatocyte (Adenoma, Focal nodular hyperplasia, Nodular regenerative hyperplasia)], malignant liver tumors [hepatocellular, hepatoblastoma, hepatocellular carcinoma, cholangiocellular, cholangiocarcinoma, cystadenocarcinoma, tumors of blood vessels, angiosarcoma, Karposi's sarcoma, hemangioendothelioma, other tumors, embryonal sarcoma, fibrosarcoma, leiomyosarcoma, rhabdomyosarcoma, carcinosarcoma, teratoma, carcinoid, squamous carcinoma, primary lymphoma]), peliosis hepatis, erythrohepatic porphyria, hepatic porphyria (acute intermittent porphyria, porphyria cutanea tarda), Zellweger syndrome).

[0868] Pancreatic diseases and/or disorders include acute pancreatitis, chronic pancreatitis (acute necrotizing pancreatitis, alcoholic pancreatitis), neoplasms (adenocarcinoma of the pancreas, cystadenocarcinoma, insulinoma, gastrinoma, and glucagonoma, cystic neoplasms, islet-cell tumors, pancreoblastoma), and other pancreatic diseases (e.g., cystic fibrosis, cyst (pancreatic pseudocyst, pancreatic fistula, insufficiency)).

[0869] Gallbladder diseases include gallstones (cholelithiasis and choledocholithiasis), postcholecystectomy syndrome, diverticulosis of the gallbladder, acute cholecystitis, chronic cholecystitis, bile duct tumors, and mucocele.

[0870] Diseases and/or disorders of the large intestine include antibiotic-associated colitis, diverticulitis, ulcerative colitis, acquired megacolon, abscesses, fungal and bacterial infections, anorectal disorders (e.g., fissures, hemorrhoids), colonic diseases (colitis, colonic neoplasms [colon cancer, adenomatous colon polyps (e.g., villous adenoma), colon carcinoma, colorectal cancer], colonic diverticulitis, colonic diverticulosis, megacolon [Hirschsprung disease, toxic megacolon]; sigmoid diseases [proctocolitis, sigmoin neoplasms]), constipation, Crohn's disease, diarrhea (infantile diarrhea, dysentery), duodenal diseases (duodenal neoplasms, duodenal obstruction, duodenal ulcer, duodenitis), enteritis (enterocolitis), HIV enteropathy, ileal diseases (ileal neoplasms, ileitis), immunoproliferative small intestinal disease, inflammatory bowel disease (ulcerative colitis, Crohn's disease), intestinal atresia, parasitic diseases (anisakiasis, balantidiasis, blastocystis infections, cryptosporidiosis, dientamoebiasis, amebic dysentery, giardiasis), intestinal fistula (rectal fistula), intestinal neoplasms (cecal neoplasms, colonic neoplasms, duodenal neoplasms, ileal neoplasms, intestinal polyps, jejunal neoplasms, rectal neoplasms), intestinal obstruction (afferent loop syndrome, duodenal obstruction, impacted feces, intestinal pseudo-obstruction [cecal volvulus], intussusception), intestinal perforation, intestinal polyps (colonic polyps, gardner syndrome, peutz-jeghers syndrome), jejunal diseases (jejunal neoplasms), malabsorption syndromes (blind loop syndrome, celiac disease, lactose intolerance, short bowl syndrome, tropical sprue, whipple's disease), mesenteric vascular occlusion, pneumatosis cystoides intestinalis, protein-losing enteropathies (intestinal lymphagiectasis), rectal diseases (anus diseases, fecal incontinence, hemorrhoids, proctitis, rectal fistula, rectal prolapse, rectocele), peptic ulcer (duodenal ulcer, peptic esophagitis, hemorrhage, perforation, stomach ulcer, Zollinger-Ellison syndrome), postgastrectomy syndromes (dumping syndrome), stomach diseases (e.g., achlorhydria, duodenogastric reflux (bile reflux), gastric antral vascular ectasia, gastric fistula, gastric outlet obstruction, gastritis (atrophic or hypertrophic), gastroparesis, stomach dilatation, stomach diverticulum, stomach neoplasms (gastric cancer, gastric polyps, gastric adenocarcinoma, hyperplastic gastric polyp), stomach rupture, stomach ulcer, stomach volvulus), tuberculosis, visceroptosis, vomiting (e.g., hematemesis, hyperemesis gravidarum, postoperative nausea and vomiting) and hemorrhagic colitis.

[0871] Further diseases and/or disorders of the gastrointestinal system include biliary tract diseases, such as, gastroschisis, fistula (e.g., biliary fistula, esophageal fistula, gastric fistula, intestinal fistula, pancreatic fistula), neoplasms (e.g., biliary tract neoplasms, esophageal neoplasms, such as adenocarcinoma of the esophagus, esophageal squamous cell carcinoma, gastrointestinal neoplasms, pancreatic neoplasms, such as adenocarcinoma of the pancreas, mucinous cystic neoplasm of the pancreas, pancreatic cystic neoplasms, pancreatoblastoma, and peritoneal neoplasms), esophageal disease (e.g., bullous diseases, candidiasis, glycogenic acanthosis, ulceration, barrett esophagus varices, atresia, cyst, diverticulum (e.g., Zenker's diverticulum), fistula (e.g., tracheoesophageal fistula), motility disorders (e.g., CREST syndrome, deglutition disorders, achalasia, spasm, gastroesophageal reflux), neoplasms, perforation (e.g., Boerhaave syndrome, Mallory-Weiss syndrome), stenosis, esophagitis, diaphragmatic hernia (e.g., hiatal hernia); gastrointestinal diseases, such as, gastroenteritis (e.g., cholera morbus, norwalk virus infection), hemorrhage (e.g., hematemesis, melena, peptic ulcer hemorrhage), stomach neoplasms (gastric cancer, gastric polyps, gastric adenocarcinoma, stomach cancer)), hernia (e.g., congenital diaphragmatic hernia, femoral hernia, inguinal hernia, obturator hernia, umbilical hernia, ventral hernia), and intestinal diseases (e.g., cecal diseases (appendicitis, cecal neoplasms)).

Chemotaxis

[0872] Polynucleotides or polypeptides, as well as agonists or antagonists of the present invention may have chemotaxis activity. A chemotaxic molecule attracts or mobilizes cells (e.g., monocytes, fibroblasts, neutrophils, T-cells, mast cells, eosinophils, epithelial and/or endothelial cells) to a particular site in the body, such as inflammation, infection, or site of hyperproliferation. The mobilized cells can then fight off and/or heal the particular trauma or abnormality.

[0873] Polynucleotides or polypeptides, as well as agonists or antagonists of the present invention may increase chemotaxic activity of particular cells. These chemotactic molecules can then be used to treat inflammation, infection, hyperproliferative disorders, or any immune system disorder by increasing the number of cells targeted to a particular location in the body. For example, chemotaxic molecules can be used to treat wounds and other trauma to tissues by attracting immune cells to the injured location. Chemotactic molecules of the present invention can also attract fibroblasts, which can be used to treat wounds.

[0874] It is also contemplated that polynucleotides or polypeptides, as well as agonists or antagonists of the present invention may inhibit chemotactic activity. These molecules could also be used to treat disorders. Thus, polynucleotides or polypeptides, as well as agonists or antagonists of the present invention could be used as an inhibitor of chemotaxis.

Binding Activity

[0875] A polypeptide of the present invention may be used to screen for molecules that bind to the polypeptide or for molecules to which the polypeptide binds. The binding of the polypeptide and the molecule may activate (agonist), increase, inhibit (antagonist), or decrease activity of the polypeptide or the molecule bound. Examples of such molecules include antibodies, oligonucleotides, proteins (e.g., receptors), or small molecules.

[0876] Preferably, the molecule is closely related to the natural ligand of the polypeptide, e.g., a fragment of the ligand, or a natural substrate, a ligand, a structural or functional mimetic. (See, Coligan et al., Current Protocols in Immunology 1(2):Chapter 5 (1991)). Similarly, the molecule can be closely related to the natural receptor to which the polypeptide binds, or at least, a fragment of the receptor capable of being bound by the polypeptide (e.g., active site). In either case, the molecule can be rationally designed using known techniques.

[0877] Preferably, the screening for these molecules involves producing appropriate cells which express the polypeptide. Preferred cells include cells from mammals, yeast, Drosophila, or E. coli. Cells expressing the polypeptide (or cell membrane containing the expressed polypeptide) are then preferably contacted with a test compound potentially containing the molecule to observe binding, stimulation, or inhibition of activity of either the polypeptide or the molecule.

[0878] The assay may simply test binding of a candidate compound to the polypeptide, wherein binding is detected by a label, or in an assay involving competition with a labeled competitor. Further, the assay may test whether the candidate compound results in a signal generated by binding to the polypeptide.

[0879] Alternatively, the assay can be carried out using cell-free preparations, polypeptide/molecule affixed to a solid support, chemical libraries, or natural product mixtures. The assay may also simply comprise the steps of mixing a candidate compound with a solution containing a polypeptide, measuring polypeptide/molecule activity or binding, and comparing the polypeptide/molecule activity or binding to a standard.

[0880] Preferably, an ELISA assay can measure polypeptide level or activity in a sample (e.g., biological sample) using a monoclonal or polyclonal antibody. The antibody can measure polypeptide level or activity by either binding, directly or indirectly, to the polypeptide or by competing with the polypeptide for a substrate.

[0881] Additionally, the receptor to which the polypeptide of the present invention binds can be identified by numerous methods known to those of skill in the art, for example, ligand panning and FACS sorting (Coligan, et al., Current Protocols in Immun., 1(2), Chapter 5, (1991)). For example, expression cloning is employed wherein polyadenylated RNA is prepared from a cell responsive to the polypeptides, for example, NIH3T3 cells which are known to contain multiple receptors for the FGF family proteins, and SC-3 cells, and a cDNA library created from this RNA is divided into pools and used to transfect COS cells or other cells that are not responsive to the polypeptides. Transfected cells which are grown on glass slides are exposed to the polypeptide of the present invention, after they have been labeled. The polypeptides can be labeled by a variety of means including iodination or inclusion of a recognition site for a site-specific protein kinase.

[0882] Following fixation and incubation, the slides are subjected to auto-radiographic analysis. Positive pools are identified and sub-pools are prepared and re-transfected using an iterative sub-pooling and re-screening process, eventually yielding a single clones that encodes the putative receptor.

[0883] As an alternative approach for receptor identification, the labeled polypeptides can be photoaffinity linked with cell membrane or extract preparations that express the receptor molecule. Cross-linked material is resolved by PAGE analysis and exposed to X-ray film. The labeled complex containing the receptors of the polypeptides can be excised, resolved into peptide fragments, and subjected to protein microsequencing. The amino acid sequence obtained from microsequencing would be used to design a set of degenerate oligonucleotide probes to screen a cDNA library to identify the genes encoding the putative receptors.

[0884] Moreover, the techniques of gene-shuffling, motif-shuffling, exon-shuffling, and/or codon-shuffling (collectively referred to as “DNA shuffling”) may be employed to modulate the activities of the polypeptide of the present invention thereby effectively generating agonists and antagonists of the polypeptide of the present invention. See generally, U.S. Pat. Nos. 5,605,793, 5,811,238, 5,830,721, 5,834,252, and 5,837,458, and Patten, P. A., et al., Curr. Opinion Biotechnol. 8:724-33 (1997); Harayama, S. Trends Biotechnol. 16(2):76-82 (1998); Hansson, L. O., et al., J. Mol. Biol. 287:265-76 (1999); and Lorenzo, M. M. and Blasco, R. Biotechniques 24(2):308-13 (1998); each of these patents and publications are hereby incorporated by reference). In one embodiment, alteration of polynucleotides and corresponding polypeptides may be achieved by DNA shuffling. DNA shuffling involves the assembly of two or more DNA segments into a desired molecule by homologous, or site-specific, recombination. In another embodiment, polynucleotides and corresponding polypeptides may be altered by being subjected to random mutagenesis by error-prone PCR, random nucleotide insertion or other methods prior to recombination. In another embodiment, one or more components, motifs, sections, parts, domains, fragments, etc., of the polypeptide of the present invention may be recombined with one or more components, motifs, sections, parts, domains, fragments, etc. of one or more heterologous molecules. In preferred embodiments, the heterologous molecules are family members. In further preferred embodiments, the heterologous molecule is a growth factor such as, for example, platelet-derived growth factor (PDGF), insulin-like growth factor (IGF-I), transforming growth factor (TGF)-alpha, epidermal growth factor (EGF), fibroblast growth factor (FGF), TGF-beta, bone morphogenetic protein (BMP)-2, BMP-4, BMP-5, BMP-6, BMP-7, activins A and B, decapentaplegic(dpp), 60A, OP-2, dorsalin, growth differentiation factors (GDFs), nodal, MIS, inhibin-alpha, TGF-beta1, TGF-beta2, TGF-beta3, TGF-beta5, and glial-derived neurotrophic factor (GDNF).

[0885] Other preferred fragments are biologically active fragments of the polypeptide of the present invention. Biologically active fragments are those exhibiting activity similar, but not necessarily identical, to an activity of the polypeptide of the present invention. The biological activity of the fragments may include an improved desired activity, or a decreased undesirable activity.

[0886] Additionally, this invention provides a method of screening compounds to identify those which modulate the action of the polypeptide of the present invention. An example of such an assay comprises combining a mammalian fibroblast cell, a the polypeptide of the present invention, the compound to be screened and ³[H] thymidine under cell culture conditions where the fibroblast cell would normally proliferate. A control assay may be performed in the absence of the compound to be screened and compared to the amount of fibroblast proliferation in the presence of the compound to determine if the compound stimulates proliferation by determining the uptake of ³[H] thymidine in each case. The amount of fibroblast cell proliferation is measured by liquid scintillation chromatography which measures the incorporation of ³[H] thymidine. Both agonist and antagonist compounds may be identified by this procedure.

[0887] In another method, a mammalian cell or membrane preparation expressing a receptor for a polypeptide of the present invention is incubated with a labeled polypeptide of the present invention in the presence of the compound. The ability of the compound to enhance or block this interaction could then be measured. Alternatively, the response of a known second messenger system following interaction of a compound to be screened and the receptor is measured and the ability of the compound to bind to the receptor and elicit a second messenger response is measured to determine if the compound is a potential agonist or antagonist. Such second messenger systems include but are not limited to, cAMP guanylate cyclase, ion channels or phosphoinositide hydrolysis.

[0888] All of these above assays can be used as diagnostic or prognostic markers. The molecules discovered using these assays can be used to treat disease or to bring about a particular result in a patient (e.g., blood vessel growth) by activating or inhibiting the polypeptide/molecule. Moreover, the assays can discover agents which may inhibit or enhance the production of the polypeptides of the invention from suitably manipulated cells or tissues.

[0889] Therefore, the invention includes a method of identifying compounds which bind to a polypeptide of the invention comprising the steps of: (a) incubating a candidate binding compound with a polypeptide of the present invention; and (b) determining if binding has occurred. Moreover, the invention includes a method of identifying agonists/antagonists comprising the steps of: (a) incubating a candidate compound with a polypeptide of the present invention, (b) assaying a biological activity, and (b) determining if a biological activity of the polypeptide has been altered.

Targeted Delivery

[0890] In another embodiment, the invention provides a method of delivering compositions to targeted cells expressing a receptor for a polypeptide of the invention, or cells expressing a cell bound form of a polypeptide of the invention.

[0891] As discussed herein, polypeptides or antibodies of the invention may be associated with heterologous polypeptides, heterologous nucleic acids, toxins, or prodrugs via hydrophobic, hydrophilic, ionic and/or covalent interactions. In one embodiment, the invention provides a method for the specific delivery of compositions of the invention to cells by administering polypeptides of the invention (including antibodies) that are associated with heterologous polypeptides or nucleic acids. In one example, the invention provides a method for delivering a therapeutic protein into the targeted cell. In another example, the invention provides a method for delivering a single stranded nucleic acid (e.g., antisense or ribozymes) or double stranded nucleic acid (e.g., DNA that can integrate into the cell's genome or replicate episomally and that can be transcribed) into the targeted cell.

[0892] In another embodiment, the invention provides a method for the specific destruction of cells (e.g., the destruction of tumor cells) by administering polypeptides of the invention (e.g., polypeptides of the invention or antibodies of the invention) in association with toxins or cytotoxic prodrugs.

[0893] By “toxin” is meant compounds that bind and activate endogenous cytotoxic effector systems, radioisotopes, holotoxins, modified toxins, catalytic subunits of toxins, or any molecules or enzymes not normally present in or on the surface of a cell that under defined conditions cause the cell's death. Toxins that may be used according to the methods of the invention include, but are not limited to, radioisotopes known in the art, compounds such as, for example, antibodies (or complement fixing containing portions thereof) that bind an inherent or induced endogenous cytotoxic effector system, thymidine kinase, endonuclease, RNAse, alpha toxin, ricin, abrin, Pseudomonas exotoxin A, diphtheria toxin, saporin, momordin, gelonin, pokeweed antiviral protein, alpha-sarcin and cholera toxin. By “cytotoxic prodrug” is meant a non-toxic compound that is converted by an enzyme, normally present in the cell, into a cytotoxic compound. Cytotoxic prodrugs that may be used according to the methods of the invention include, but are not limited to, glutamyl derivatives of benzoic acid mustard alkylating agent, phosphate derivatives of etoposide or mitomycin C, cytosine arabinoside, daunorubisin, and phenoxyacetamide derivatives of doxorubicin.

Drug Screening

[0894] Further contemplated is the use of the polypeptides of the present invention, or the polynucleotides encoding these polypeptides, to screen for molecules which modify the activities of the polypeptides of the present invention. Such a method would include contacting the polypeptide of the present invention with a selected compound(s) suspected of having antagonist or agonist activity, and assaying the activity of these polypeptides following binding.

[0895] This invention is particularly useful for screening therapeutic compounds by using the polypeptides of the present invention, or binding fragments thereof, in any of a variety of drug screening techniques. The polypeptide or fragment employed in such a test may be affixed to a solid support, expressed on a cell surface, free in solution, or located intracellularly. One method of drug screening utilizes eukaryotic or prokaryotic host cells which are stably transformed with recombinant nucleic acids expressing the polypeptide or fragment. Drugs are screened against such transformed cells in competitive binding assays. One may measure, for example, the formulation of complexes between the agent being tested and a polypeptide of the present invention.

[0896] Thus, the present invention provides methods of screening for drugs or any other agents which affect activities mediated by the polypeptides of the present invention. These methods comprise contacting such an agent with a polypeptide of the present invention or a fragment thereof and assaying for the presence of a complex between the agent and the polypeptide or a fragment thereof, by methods well known in the art. In such a competitive binding assay, the agents to screen are typically labeled. Following incubation, free agent is separated from that present in bound form, and the amount of free or uncomplexed label is a measure of the ability of a particular agent to bind to the polypeptides of the present invention.

[0897] Another technique for drug screening provides high throughput screening for compounds having suitable binding affinity to the polypeptides of the present invention, and is described in great detail in European Patent Application 84/03564, published on Sep. 13, 1984, which is incorporated herein by reference herein. Briefly stated, large numbers of different small peptide test compounds are synthesized on a solid substrate, such as plastic pins or some other surface. The peptide test compounds are reacted with polypeptides of the present invention and washed. Bound polypeptides are then detected by methods well known in the art. Purified polypeptides are coated directly onto plates for use in the aforementioned drug screening techniques. In addition, non-neutralizing antibodies may be used to capture the peptide and immobilize it on the solid support.

[0898] This invention also contemplates the use of competitive drug screening assays in which neutralizing antibodies capable of binding polypeptides of the present invention specifically compete with a test compound for binding to the polypeptides or fragments thereof. In this manner, the antibodies are used to detect the presence of any peptide which shares one or more antigenic epitopes with a polypeptide of the invention.

Polypeptides of the Invention Binding Peptides and Other Molecules

[0899] The invention also encompasses screening methods for identifying polypeptides and nonpolypeptides that bind polypeptides of the invention, and the polypeptide of the invention binding molecules identified thereby. These binding molecules are useful, for example, as agonists and antagonists of the polypeptides of the invention. Such agonists and antagonists can be used, in accordance with the invention, in the therapeutic embodiments described in detail, below.

[0900] This method comprises the steps of: contacting a polypeptide of the invention with a plurality of molecules; and identifying a molecule that binds the polypeptide of the invention.

[0901] The step of contacting the polypeptide of the invention with the plurality of molecules may be effected in a number of ways. For example, one may contemplate immobilizing the polypeptide of the invention on a solid support and bringing a solution of the plurality of molecules in contact with the immobilized polypeptide of the invention. Such a procedure would be akin to an affinity chromatographic process, with the affinity matrix being comprised of the immobilized polypeptide of the invention. The molecules having a selective affinity for the polypeptide of the invention can then be purified by affinity selection. The nature of the solid support, process for attachment of the polypeptide of the invention to the solid support, solvent, and conditions of the affinity isolation or selection are largely conventional and well known to those of ordinary skill in the art.

[0902] Alternatively, one may also separate a plurality of polypeptides into substantially separate fractions comprising a subset of or individual polypeptides. For instance, one can separate the plurality of polypeptides by gel electrophoresis, column chromatography, or like method known to those of ordinary skill for the separation of polypeptides. The individual polypeptides can also be produced by a transformed host cell in such a way as to be expressed on or about its outer surface (e.g., a recombinant phage). Individual isolates can then be “probed” by the polypeptide of the invention, optionally in the presence of an inducer should one be required for expression, to determine if any selective affinity interaction takes place between the polypeptide of the invention and the individual clone. Prior to contacting the polypeptide of the invention with each fraction comprising individual polypeptides, the polypeptides could first be transferred to a solid support for additional convenience. Such a solid support may simply be a piece of filter membrane, such as one made of nitrocellulose or nylon. In this manner, positive clones could be identified from a collection of transformed host cells of an expression library, which harbor a DNA construct encoding a polypeptide having a selective affinity for a polypeptide of the invention. Furthermore, the amino acid sequence of the polypeptide having a selective affinity for the polypeptide of the invention can be determined directly by conventional means or the coding sequence of the DNA encoding the polypeptide can frequently be determined more conveniently. The primary sequence can then be deduced from the corresponding DNA sequence. If the amino acid sequence is to be determined from the polypeptide itself, one may use microsequencing techniques. The sequencing technique may include mass spectroscopy.

[0903] In certain situations, it may be desirable to wash away any unbound polypeptide of the invention, or alterntatively, unbound polypeptides, from a mixture of the polypeptide of the invention and the plurality of polypeptides prior to attempting to determine or to detect the presence of a selective affinity interaction. Such a wash step may be particularly desirable when the polypeptide of the invention or the plurality of polypeptides is bound to a solid support.

[0904] The plurality of molecules provided according to this method may be provided by way of diversity libraries, such as random or combinatorial peptide or nonpeptide libraries which can be screened for molecules that specifically bind to a polypeptide of the invention. Many libraries are known in the art that can be used, e.g., chemically synthesized libraries, recombinant (e.g., phage display libraries), and in vitro translation-based libraries. Examples of chemically synthesized libraries are described in Fodor et al., 1991, Science 251:767-773; Houghten et al., 1991, Nature 354:84-86; Lam et al., 1991, Nature 354:82-84; Medynski, 1994, Bio/Technology 12:709-710; Gallop et al., 1994, J. Medicinal Chemistry 37(9):1233-1251; Ohlmeyer et al., 1993, Proc. Natl. Acad. Sci. USA 90:10922-10926; Erb et al., 1994, Proc. Natl. Acad. Sci. USA 91:11422-11426; Houghten et al., 1992, Biotechniques 13:412; Jayawickreme et al., 1994, Proc. Natl. Acad. Sci. USA 91:1614-1618; Salmon et al., 1993, Proc. Natl. Acad. Sci. USA 90:11708-11712; PCT Publication No. WO 93/20242; and Brenner and Lerner, 1992, Proc. Natl. Acad. Sci. USA 89:5381-5383.

[0905] Examples of phage display libraries are described in Scott and Smith, 1990, Science 249:386-390; Devlin et al., 1990, Science, 249:404-406; Christian, R. B., et al., 1992, J. Mol. Biol. 227:711-718); Lenstra, 1992, J. Immunol. Meth. 152:149-157; Kay et al., 1993, Gene 128:59-65; and PCT Publication No. WO 94/18318 dated Aug. 18, 1994.

[0906] In vitro translation-based libraries include but are not limited to those described in PCT Publication No. WO 91/05058 dated Apr. 18, 1991; and Mattheakis et al., 1994, Proc. Natl. Acad. Sci. USA 91:9022-9026.

[0907] By way of examples of nonpeptide libraries, a benzodiazepine library (see e.g., Bunin et al., 1994, Proc. Natl. Acad. Sci. USA 91:4708-4712) can be adapted for use. Peptoid libraries (Simon et al., 1992, Proc. Natl. Acad. Sci. USA 89:9367-9371) can also be used. Another example of a library that can be used, in which the amide functionalities in peptides have been permethylated to generate a chemically transformed combinatorial library, is described by Ostresh et al. (1994, Proc. Natl. Acad. Sci. USA 91:11138-11142).

[0908] The variety of non-peptide libraries that are useful in the present invention is great. For example, Ecker and Crooke, 1995, Bio/Technology 13:351-360 list benzodiazepines, hydantoins, piperazinediones, biphenyls, sugar analogs, beta-mercaptoketones, arylacetic acids, acylpiperidines, benzopyrans, cubanes, xanthines, aminimides, and oxazolones as among the chemical species that form the basis of various libraries.

[0909] Non-peptide libraries can be classified broadly into two types: decorated monomers and oligomers. Decorated monomer libraries employ a relatively simple scaffold structure upon which a variety functional groups is added. Often the scaffold will be a molecule with a known useful pharmacological activity. For example, the scaffold might be the benzodiazepine structure.

[0910] Non-peptide oligomer libraries utilize a large number of monomers that are assembled together in ways that create new shapes that depend on the order of the monomers. Among the monomer units that have been used are carbamates, pyrrolinones, and morpholinos. Peptoids, peptide-like oligomers in which the side chain is attached to the alpha amino group rather than the alpha carbon, form the basis of another version of non-peptide oligomer libraries. The first non-peptide oligomer libraries utilized a single type of monomer and thus contained a repeating backbone. Recent libraries have utilized more than one monomer, giving the libraries added flexibility.

[0911] Screening the libraries can be accomplished by any of a variety of commonly known methods. See, e.g., the following references, which disclose screening of peptide libraries: Parmley and Smith, 1989, Adv. Exp. Med. Biol. 251:215-218; Scott and Smith, 1990, Science 249:386-390; Fowlkes et al., 1992; BioTechniques 13:422-427; Oldenburg et al., 1992, Proc. Natl. Acad. Sci. USA 89:5393-5397; Yu et al., 1994, Cell 76:933-945; Staudt et al., 1988, Science 241:577-580; Bock et al., 1992, Nature 355:564-566; Tuerk et al., 1992, Proc. Natl. Acad. Sci. USA 89:6988-6992; Ellington et al., 1992, Nature 355:850-852; U.S. Pat. No. 5,096,815, U.S. Pat. No. 5,223,409, and U.S. Pat. No. 5,198,346, all to Ladner et al.; Rebar and Pabo, 1993, Science 263:671-673; and CT Publication No. WO 94/18318.

[0912] In a specific embodiment, screening to identify a molecule that binds a polypeptide of the invention can be carried out by contacting the library members with a polypeptide of the invention immobilized on a solid phase and harvesting those library members that bind to the polypeptide of the invention. Examples of such screening methods, termed “panning” techniques are described by way of example in Parmley and Smith, 1988, Gene 73:305-318; Fowlkes et al., 1992, BioTechniques 13:422-427; PCT Publication No. WO 94/18318; and in references cited herein.

[0913] In another embodiment, the two-hybrid system for selecting interacting proteins in yeast (Fields and Song, 1989, Nature 340:245-246; Chien et al., 1991, Proc. Natl. Acad. Sci. USA 88:9578_{—}9582) can be used to identify molecules that specifically bind to a polypeptide of the invention.

[0914] Where the polypeptide of the invention binding molecule is a polypeptide, the polypeptide can be conveniently selected from any peptide library, including random peptide libraries, combinatorial peptide libraries, or biased peptide libraries. The term “biased” is used herein to mean that the method of generating the library is manipulated so as to restrict one or more parameters that govern the diversity of the resulting collection of molecules, in this case peptides.

[0915] Thus, a truly random peptide library would generate a collection of peptides in which the probability of finding a particular amino acid at a given position of the peptide is the same for all 20 amino acids. A bias can be introduced into the library, however, by specifying, for example, that a lysine occur every fifth amino acid or that positions 4, 8, and 9 of a decapeptide library be fixed to include only arginine. Clearly, many types of biases can be contemplated, and the present invention is not restricted to any particular bias. Furthermore, the present invention contemplates specific types of peptide libraries, such as phage displayed peptide libraries and those that utilize a DNA construct comprising a lambda phage vector with a DNA insert.

[0916] As mentioned above, in the case of a polypeptide of the invention binding molecule that is a polypeptide, the polypeptide may have about 6 to less than about 60 amino acid residues, preferably about 6 to about 10 amino acid residues, and most preferably, about 6 to about 22 amino acids. In another embodiment, a polypeptide of the invention binding polypeptide has in the range of 15-100 amino acids, or 20-50 amino acids.

[0917] The selected polypeptide of the invention binding polypeptide can be obtained by chemical synthesis or recombinant expression.

Antisense And Ribozyme (Antagonists)

[0918] In specific embodiments, antagonists according to the present invention are nucleic acids corresponding to the sequences contained in SEQ ID NO:X, or the complementary strand thereof, and/or to nucleotide sequences contained a deposited clone. In one embodiment, antisense sequence is generated internally by the organism, in another embodiment, the antisense sequence is separately administered (see, for example, O'Connor, Neurochem., 56:560 (1991). Oligodeoxynucleotides as Anitsense Inhibitors of Gene Expression, CRC Press, Boca Raton, Fla. (1988). Antisense technology can be used to control gene expression through antisense DNA or RNA, or through triple-helix formation. Antisense techniques are discussed for example, in Okano, Neurochem., 56:560 (1991); Oligodeoxynucleotides as Antisense Inhibitors of Gene Expression, CRC Press, Boca Raton, Fla. (1988). Triple helix formation is discussed in, for instance, Lee et al., Nucleic Acids Research, 6:3073 (1979); Cooney et al., Science, 241:456 (1988); and Dervan et al., Science, 251:1300 (1991). The methods are based on binding of a polynucleotide to a complementary DNA or RNA.

[0919] For example, the use of c-myc and c-myb antisense RNA constructs to inhibit the growth of the non-lymphocytic leukemia cell line HL-60 and other cell lines was previously described. (Wickstrom et al. (1988); Anfossi et al. (1989)). These experiments were performed in vitro by incubating cells with the oligoribonucleotide. A similar procedure for in vivo use is described in WO 91/15580. Briefly, a pair of oligonucleotides for a given antisense RNA is produced as follows: A sequence complimentary to the first 15 bases of the open reading frame is flanked by an EcoRI site on the 5 end and a HindIII site on the 3 end. Next, the pair of oligonucleotides is heated at 90° C. for one minute and then annealed in 2× ligation buffer (20 mM TRIS HCl pH 7.5, 10 MM MgCl2, 10 MM dithiothreitol (DTT) and 0.2 mM ATP) and then ligated to the EcoR1/Hind III site of the retroviral vector PMV7 (WO 91/15580).

[0920] For example, the 5′ coding portion of a polynucleotide that encodes the mature polypeptide of the present invention may be used to design an antisense RNA oligonucleotide of from about 10 to 40 base pairs in length. A DNA oligonucleotide is designed to be complementary to a region of the gene involved in transcription thereby preventing transcription and the production of the receptor. The antisense RNA oligonucleotide hybridizes to the mRNA in vivo and blocks translation of the mRNA molecule into receptor polypeptide.

[0921] In one embodiment, the antisense nucleic acid of the invention is produced intracellularly by transcription from an exogenous sequence. For example, a vector or a portion thereof, is transcribed, producing an antisense nucleic acid (RNA) of the invention. Such a vector would contain a sequence encoding the antisense nucleic acid of the invention. Such a vector can remain episomal or become chromosomally integrated, as long as it can be transcribed to produce the desired antisense RNA. Such vectors can be constructed by recombinant DNA technology methods standard in the art. Vectors can be plasmid, viral, or others known in the art, used for replication and expression in vertebrate cells. Expression of the sequence encoding a polypeptide of the invention, or fragments thereof, can be by any promoter known in the art to act in vertebrate, preferably human cells. Such promoters can be inducible or constitutive. Such promoters include, but are not limited to, the SV40 early promoter region (Bernoist and Chambon, Nature, 29:304-310 (1981), the promoter contained in the 3′ long terminal repeat of Rous sarcoma virus (Yamamoto et al., Cell, 22:787-797 (1980), the herpes thymidine promoter (Wagner et al., Proc. Natl. Acad. Sci. U.S.A., 78:1441-1445 (1981), the regulatory sequences of the metallothionein gene (Brinster et al., Nature, 296:39-42 (1982)), etc.

[0922] The antisense nucleic acids of the invention comprise a sequence complementary to at least a portion of an RNA transcript of a gene of interest. However, absolute complementarity, although preferred, is not required. A sequence “complementary to at least a portion of an RNA,” referred to herein, means a sequence having sufficient complementarity to be able to hybridize with the RNA, forming a stable duplex; in the case of double stranded antisense nucleic acids of the invention, a single strand of the duplex DNA may thus be tested, or triplex formation may be assayed. The ability to hybridize will depend on both the degree of complementarity and the length of the antisense nucleic acid Generally, the larger the hybridizing nucleic acid, the more base mismatches with a RNA sequence of the invention it may contain and still form a stable duplex (or triplex as the case may be). One skilled in the art can ascertain a tolerable degree of mismatch by use of standard procedures to determine the melting point of the hybridized complex.

[0923] Oligonucleotides that are complementary to the 5′ end of the message, e.g., the 5′ untranslated sequence up to and including the AUG initiation codon, should work most efficiently at inhibiting translation. However, sequences complementary to the 3′ untranslated sequences of mRNAs have been shown to be effective at inhibiting translation of mRNAs as well. See generally, Wagner, R., Nature, 372:333-335 (1994). Thus, oligonucleotides complementary to either the 5′- or 3′-non-translated, non-coding regions of a polynucleotide sequence of the invention could be used in an antisense approach to inhibit translation of endogenous mRNA. Oligonucleotides complementary to the 5′ untranslated region of the mRNA should include the complement of the AUG start codon. Antisense oligonucleotides complementary to mRNA coding regions are less efficient inhibitors of translation but could be used in accordance with the invention. Whether designed to hybridize to the 5′-, 3′- or coding region of mRNA, antisense nucleic acids should be at least six nucleotides in length, and are preferably oligonucleotides ranging from 6 to about 50 nucleotides in length. In specific aspects the oligonucleotide is at least 10 nucleotides, at least 17 nucleotides, at least 25 nucleotides or at least 50 nucleotides.

[0924] The polynucleotides of the invention can be DNA or RNA or chimeric mixtures or derivatives or modified versions thereof, single-stranded or double-stranded. The oligonucleotide can be modified at the base moiety, sugar moiety, or phosphate backbone, for example, to improve stability of the molecule, hybridization, etc. The oligonucleotide may include other appended groups such as peptides (e.g., for targeting host cell receptors in vivo), or agents facilitating transport across the cell membrane (see, e.g., Letsinger et al., Proc. Natl. Acad. Sci. U.S.A. 86:6553-6556 (1989); Lemaitre et al., Proc. Natl. Acad. Sci., 84:648-652 (1987); PCT Publication NO: WO88/09810, published Dec. 15, 1988) or the blood-brain barrier (see, e.g., PCT Publication NO: WO89/10134, published Apr. 25, 1988), hybridization-triggered cleavage agents. (See, e.g., Krol et al., BioTechniques, 6:958_{—}976 (1988)) or intercalating agents. (See, e.g., Zon, Pharm. Res., 5:539-549 (1988)). To this end, the oligonucleotide may be conjugated to another molecule, e.g., a peptide, hybridization triggered cross-linking agent, transport agent, hybridization-triggered cleavage agent, etc.

[0925] The antisense oligonucleotide may comprise at least one modified base moiety which is selected from the group including, but not limited to, 5-fluorouracil, 5-bromouracil, 5-chlorouracil, 5-iodouracil, hypoxanthine, xantine, 4-acetylcytosine, 5-(carboxyhydroxylmethyl) uracil, 5-carboxymethylaminomethyl-2-thiouridine, 5-carboxymethylaminomethyluracil, dihydrouracil, beta-D-galactosylqueosine, inosine, N6-isopentenyladenine, 1-methylguanine, 1-methylinosine, 2,2-dimethylguanine, 2-methyladenine, 2-methylguanine, 3-methylcytosine, 5-methylcytosine, N6-adenine, 7-methylguanine, 5-methylaminomethyluracil, 5-methoxyaminomethyl-2-thiouracil, beta-D-mannosylqueosine, 5′-methoxycarboxymethyluracil, 5-methoxyuracil, 2-methylthio-N-6-isopentenyladenine, uracil-5-oxyacetic acid (v), wybutoxosine, pseudouracil, queosine, 2-thiocytosine, 5-methyl-2-thiouracil, 2-thiouracil, 4-thiouracil, 5-methyluracil, uracil-5-oxyacetic acid methylester, uracil-5-oxyacetic acid (v), 5-methyl-2-thiouracil, 3-(3-amino-3-N-2-carboxypropyl) uracil, (acp3)w, and 2,6-diaminopurine.

[0926] The antisense oligonucleotide may also comprise at least one modified sugar moiety selected from the group including, but not limited to, arabinose, 2-fluoroarabinose, xylulose, and hexose.

[0927] In yet another embodiment, the antisense oligonucleotide comprises at least one modified phosphate backbone selected from the group including, but not limited to, a phosphorothioate, a phosphorodithioate, a phosphoramidothioate, a phosphoramidate, a phosphordiamidate, a methylphosphonate, an alkyl phosphotriester, and a formacetal or analog thereof.

[0928] In yet another embodiment, the antisense oligonucleotide is an a-anomeric oligonucleotide. An a-anomeric oligonucleotide forms specific double-stranded hybrids with complementary RNA in which, contrary to the usual b-units, the strands run parallel to each other (Gautier et al., Nucl. Acids Res., 15:6625-6641 (1987)). The oligonucleotide is a 2-0-methylribonucleotide (Inoue et al., Nucl. Acids Res., 15:6131-6148 (1987)), or a chimeric RNA-DNA analogue (Inoue et al., FEBS Lett. 215:327-330 (1987)).

[0929] Polynucleotides of the invention may be synthesized by standard methods known in the art, e.g. by use of an automated DNA synthesizer (such as are commercially available from Biosearch, Applied Biosystems, etc.). As examples, phosphorothioate oligonucleotides may be synthesized by the method of Stein et al. (Nucl. Acids Res., 16:3209 (1988)), methylphosphonate oligonucleotides can be prepared by use of controlled pore glass polymer supports (Sarin et al., Proc. Natl. Acad. Sci. U.S.A., 85:7448-7451 (1988)), etc.

[0930] While antisense nucleotides complementary to the coding region sequence of the invention could be used, those complementary to the transcribed untranslated region are most preferred.

[0931] Potential antagonists according to the invention also include catalytic RNA, or a ribozyme (See, e.g., PCT International Publication WO 90/11364, published Oct. 4, 1990; Sarver et al, Science, 247:1222-1225 (1990). While ribozymes that cleave mRNA at site specific recognition sequences can be used to destroy mRNAs corresponding to the polynucleotides of the invention, the use of hammerhead ribozymes is preferred. Hammerhead ribozymes cleave mRNAs at locations dictated by flanking regions that form complementary base pairs with the target mRNA. The sole requirement is that the target mRNA have the following sequence of two bases: 5′-UG-3′. The construction and production of hammerhead ribozymes is well known in the art and is described more fully in Haseloff and Gerlach, Nature, 334:585-591 (1988). There are numerous potential hammerhead ribozyme cleavage sites within each nucleotide sequence disclosed in the sequence listing. Preferably, the ribozyme is engineered so that the cleavage recognition site is located near the 5′ end of the mRNA corresponding to the polynucleotides of the invention; i.e., to increase efficiency and minimize the intracellular accumulation of non-functional mRNA transcripts.

[0932] As in the antisense approach, the ribozymes of the invention can be composed of modified oligonucleotides (e.g. for improved stability, targeting, etc.) and should be delivered to cells which express the polynucleotides of the invention in vivo. DNA constructs encoding the ribozyme may be introduced into the cell in the same manner as described above for the introduction of antisense encoding DNA. A preferred method of delivery involves using a DNA construct “encoding” the ribozyme under the control of a strong constitutive promoter, such as, for example, pol III or pol II promoter, so that transfected cells will produce sufficient quantities of the ribozyme to destroy endogenous messages and inhibit translation. Since ribozymes unlike antisense molecules, are catalytic, a lower intracellular concentration is required for efficiency.

[0933] Antagonist/agonist compounds may be employed to inhibit the cell growth and proliferation effects of the polypeptides of the present invention on neoplastic cells and tissues, i.e. stimulation of angiogenesis of tumors, and, therefore, retard or prevent abnormal cellular growth and proliferation, for example, in tumor formation or growth.

[0934] The antagonist/agonist may also be employed to prevent hyper-vascular diseases, and prevent the proliferation of epithelial lens cells after extracapsular cataract surgery. Prevention of the mitogenic activity of the polypeptides of the present invention may also be desirous in cases such as restenosis after balloon angioplasty.

[0935] The antagonist/agonist may also be employed to prevent the growth of scar tissue during wound healing.

[0936] The antagonist/agonist may also be employed to treat, prevent, and/or diagnose the diseases described herein.

[0937] Thus, the invention provides a method of treating or preventing diseases, disorders, and/or conditions, including but not limited to the diseases, disorders, and/or conditions listed throughout this application, associated with overexpression of a polynucleotide of the present invention by administering to a patient (a) an antisense molecule directed to the polynucleotide of the present invention, and/or (b) a ribozyme directed to the polynucleotide of the present invention.

[0938] invention, and/or (b) a ribozyme directed to the polynucleotide of the present invention.

Other Activities

[0939] The polypeptide of the present invention, as a result of the ability to stimulate vascular endothelial cell growth, may be employed in treatment for stimulating re-vascularization of ischemic tissues due to various disease conditions such as thrombosis, arteriosclerosis, and other cardiovascular conditions. These polypeptide may also be employed to stimulate angiogenesis and limb regeneration, as discussed above.

[0940] The polypeptide may also be employed for treating wounds due to injuries, burns, post-operative tissue repair, and ulcers since they are mitogenic to various cells of different origins, such as fibroblast cells and skeletal muscle cells, and therefore, facilitate the repair or replacement of damaged or diseased tissue.

[0941] The polypeptide of the present invention may also be employed stimulate neuronal growth and to treat, prevent, and/or diagnose neuronal damage which occurs in certain neuronal disorders or neuro-degenerative conditions such as Alzheimer's disease, Parkinson's disease, and AIDS-related complex. The polypeptide of the invention may have the ability to stimulate chondrocyte growth, therefore, they may be employed to enhance bone and periodontal regeneration and aid in tissue transplants or bone grafts.

[0942] The polypeptide of the present invention may be also be employed to prevent skin aging due to sunburn by stimulating keratinocyte growth.

[0943] The polypeptide of the invention may also be employed for preventing hair loss, since FGF family members activate hair-forming cells and promotes melanocyte growth. Along the same lines, the polypeptides of the present invention may be employed to stimulate growth and differentiation of hematopoietic cells and bone marrow cells when used in combination with other cytokines.

[0944] The polypeptide of the invention may also be employed to maintain organs before transplantation or for supporting cell culture of primary tissues.

[0945] The polypeptide of the present invention may also be employed for inducing tissue of mesodermal origin to differentiate in early embryos.

[0946] The polypeptide or polynucleotides and/or agonist or antagonists of the present invention may also increase or decrease the differentiation or proliferation of embryonic stem cells, besides, as discussed above, hematopoietic lineage.

[0947] The polypeptide or polynucleotides and/or agonist or antagonists of the present invention may also be used to modulate mammalian characteristics, such as body height, weight, hair color, eye color, skin, percentage of adipose tissue, pigmentation, size, and shape (e.g., cosmetic surgery). Similarly, polypeptides or polynucleotides and/or agonist or antagonists of the present invention may be used to modulate mammalian metabolism affecting catabolism, anabolism, processing, utilization, and storage of energy.

[0948] A polypeptide, polynucleotide, agonist, or antagonist of the present invention may be used to treat weight disorders, including but not limited to, obesity, cachexia, wasting disease, anorexia, and bulimia.

[0949] Polypeptide or polynucleotides and/or agonist or antagonists of the present invention may be used to change a mammal's mental state or physical state by influencing biorhythms, caricadic rhythms, depression (including depressive diseases, disorders, and/or conditions), tendency for violence, tolerance for pain, reproductive capabilities (preferably by Activin or Inhibin-like activity), hormonal or endocrine levels, appetite, libido, memory, stress, or other cognitive qualities.

[0950] Polypeptide or polynucleotides and/or agonist or antagonists of the present invention may also be used as a food additive or preservative, such as to increase or decrease storage capabilities, fat content, lipid, protein, carbohydrate, vitamins, minerals, cofactors or other nutritional components.

### Other Preferred Embodiments

[0951] Other preferred embodiments of the claimed invention include an isolated nucleic acid molecule comprising a nucleotide sequence which is at least 95% identical to a sequence of at least about 50 contiguous nucleotides in the nucleotide sequence of SEQ ID NO:X wherein X is any integer as defined in Table 1A.

[0952] Also preferred is a nucleic acid molecule wherein said sequence of contiguous nucleotides is included in the nucleotide sequence of SEQ ID NO:X in the range of positions beginning with the nucleotide at about the position of the 5′ Nucleotide of the Clone Sequence and ending with the nucleotide at about the position of the 3′ Nucleotide of the Clone Sequence as defined for SEQ ID NO:X in Table 1A.

[0953] Also preferred is a nucleic acid molecule wherein said sequence of contiguous nucleotides is included in the nucleotide sequence of SEQ ID NO:X in the range of positions beginning with the nucleotide at about the position of the 5′ Nucleotide of the Start Codon and ending with the nucleotide at about the position of the 3′ Nucleotide of the Clone Sequence as defined for SEQ ID NO:X in Table 1A.

[0954] Similarly preferred is a nucleic acid molecule wherein said sequence of contiguous nucleotides is included in the nucleotide sequence of SEQ ID NO:X in the range of positions beginning with the nucleotide at about the position of the 5′ Nucleotide of the First Amino Acid of the Signal Peptide and ending with the nucleotide at about the position of the 3′ Nucleotide of the Clone Sequence as defined for SEQ ID NO:X in Table 1A.

[0955] Also preferred is an isolated nucleic acid molecule comprising a nucleotide sequence which is at least 95% identical to a sequence of at least about 150 contiguous nucleotides in the nucleotide sequence of SEQ ID NO:X.

[0956] Further preferred is an isolated nucleic acid molecule comprising a nucleotide sequence which is at least 95% identical to a sequence of at least about 500 contiguous nucleotides in the nucleotide sequence of SEQ ID NO:X.

[0957] A further preferred embodiment is a nucleic acid molecule comprising a nucleotide sequence which is at least 95% identical to the nucleotide sequence of SEQ ID NO:X beginning with the nucleotide at about the position of the 5′ Nucleotide of the First Amino Acid of the Signal Peptide and ending with the nucleotide at about the position of the 3′ Nucleotide of the Clone Sequence as defined for SEQ ID NO:X in Table 1A.

[0958] A further preferred embodiment is an isolated nucleic acid molecule comprising a nucleotide sequence which is at least 95% identical to the complete nucleotide sequence of SEQ ID NO:X.

[0959] Also preferred is an isolated nucleic acid molecule which hybridizes under stringent hybridization conditions to a nucleic acid molecule, wherein said nucleic acid molecule which hybridizes does not hybridize under stringent hybridization conditions to a nucleic acid molecule having a nucleotide sequence consisting of only A residues or of only T residues.

[0960] Also preferred is a composition of matter comprising a DNA molecule which comprises a human cDNA clone identified by a cDNA Clone Identifier in Table 1A, which DNA molecule is contained in the material deposited with the American Type Culture Collection and given the ATCC Deposit Number shown in Table 1A for said cDNA Clone Identifier.

[0961] Also preferred is an isolated nucleic acid molecule comprising a nucleotide sequence which is at least 95% identical to a sequence of at least 50 contiguous nucleotides in the nucleotide sequence of a human cDNA clone identified by a cDNA Clone Identifier in Table 1A, which DNA molecule is contained in the deposit given the ATCC Deposit Number shown in Table 1A.

[0962] Also preferred is an isolated nucleic acid molecule, wherein said sequence of at least 50 contiguous nucleotides is included in the nucleotide sequence of the complete open reading frame sequence encoded by said human cDNA clone.

[0963] Also preferred is an isolated nucleic acid molecule comprising a nucleotide sequence which is at least 95% identical to sequence of at least 150 contiguous nucleotides in the nucleotide sequence encoded by said human cDNA clone.

[0964] A further preferred embodiment is an isolated nucleic acid molecule comprising a nucleotide sequence which is at least 95% identical to sequence of at least 500 contiguous nucleotides in the nucleotide sequence encoded by said human cDNA clone.

[0965] A further preferred embodiment is an isolated nucleic acid molecule comprising a nucleotide sequence which is at least 95% identical to the complete nucleotide sequence encoded by said human cDNA clone.

[0966] A further preferred embodiment is a method for detecting in a biological sample a nucleic acid molecule comprising a nucleotide sequence which is at least 95% identical to a sequence of at least 50 contiguous nucleotides in a sequence selected from the group consisting of: a nucleotide sequence of SEQ ID NO:X wherein X is any integer as defined in Table 1A; and a nucleotide sequence encoded by a human cDNA clone identified by a cDNA Clone Identifier in Table 1A and contained in the deposit with the ATCC Deposit Number shown for said cDNA clone in Table 1A; which method comprises a step of comparing a nucleotide sequence of at least one nucleic acid molecule in said sample with a sequence selected from said group and determining whether the sequence of said nucleic acid molecule in said sample is at least 95% identical to said selected sequence.

[0967] Also preferred is the above method wherein said step of comparing sequences comprises determining the extent of nucleic acid hybridization between nucleic acid molecules in said sample and a nucleic acid molecule comprising said sequence selected from said group. Similarly, also preferred is the above method wherein said step of comparing sequences is performed by comparing the nucleotide sequence determined from a nucleic acid molecule in said sample with said sequence selected from said group. The nucleic acid molecules can comprise DNA molecules or RNA molecules.

[0968] A further preferred embodiment is a method for identifying the species, tissue or cell type of a biological sample which method comprises a step of detecting nucleic acid molecules in said sample, if any, comprising a nucleotide sequence that is at least 95% identical to a sequence of at least 50 contiguous nucleotides in a sequence selected from the group consisting of: a nucleotide sequence of SEQ ID NO:X wherein X is any integer as defined in Table 1A; and a nucleotide sequence encoded by a human cDNA clone identified by a cDNA Clone Identifier in Table 1A and contained in the deposit with the ATCC Deposit Number shown for said cDNA clone in Table 1A.

[0969] The method for identifying the species, tissue or cell type of a biological sample can comprise a step of detecting nucleic acid molecules comprising a nucleotide sequence in a panel of at least two nucleotide sequences, wherein at least one sequence in said panel is at least 95% identical to a sequence of at least 50 contiguous nucleotides in a sequence selected from said group.

[0970] Also preferred is a method for diagnosing in a subject a pathological condition associated with abnormal structure or expression of a gene encoding a secreted protein identified in Table 1A, which method comprises a step of detecting in a biological sample obtained from said subject nucleic acid molecules, if any, comprising a nucleotide sequence that is at least 95% identical to a sequence of at least 50 contiguous nucleotides in a sequence selected from the group consisting of: a nucleotide sequence of SEQ ID NO:X wherein X is any integer as defined in Table 1A; and a nucleotide sequence encoded by a human cDNA clone identified by a cDNA Clone Identifier in Table 1A and contained in the deposit with the ATCC Deposit Number shown for said cDNA clone in Table 1A.

[0971] The method for diagnosing a pathological condition can comprise a step of detecting nucleic acid molecules comprising a nucleotide sequence in a panel of at least two nucleotide sequences, wherein at least one sequence in said panel is at least 95% identical to a sequence of at least 50 contiguous nucleotides in a sequence selected from said group.

[0972] Also preferred is a composition of matter comprising isolated nucleic acid molecules wherein the nucleotide sequences of said nucleic acid molecules comprise a panel of at least two nucleotide sequences, wherein at least one sequence in said panel is at least 95% identical to a sequence of at least 50 contiguous nucleotides in a sequence selected from the group consisting of: a nucleotide sequence of SEQ ID NO:X wherein X is any integer as defined in Table 1A; and a nucleotide sequence encoded by a human cDNA clone identified by a cDNA Clone Identifier in Table 1A and contained in the deposit with the ATCC Deposit Number shown for said cDNA clone in Table 1A. The nucleic acid molecules can comprise DNA molecules or RNA molecules.

[0973] Also preferred is an isolated polypeptide comprising an amino acid sequence at least 90% identical to a sequence of at least about 10 contiguous amino acids in the amino acid sequence of SEQ ID NO:Y wherein Y is any integer as defined in Table 1A.

[0974] Also preferred is a polypeptide, wherein said sequence of contiguous amino acids is included in the amino acid sequence of SEQ ID NO:Y in the range of positions beginning with the residue at about the position of the First Amino Acid of the Secreted Portion and ending with the residue at about the Last Amino Acid of the Open Reading Frame as set forth for SEQ ID NO:Y in Table 1A.

[0975] Also preferred is an isolated polypeptide comprising an amino acid sequence at least 95% identical to a sequence of at least about 30 contiguous amino acids in the amino acid sequence of SEQ ID NO:Y.

[0976] Further preferred is an isolated polypeptide comprising an amino acid sequence at least 95% identical to a sequence of at least about 100 contiguous amino acids in the amino acid sequence of SEQ ID NO:Y.

[0977] Further preferred is an isolated polypeptide comprising an amino acid sequence at least 95% identical to the complete amino acid sequence of SEQ ID NO:Y.

[0978] Further preferred is an isolated polypeptide comprising an amino acid sequence at least 90% identical to a sequence of at least about 10 contiguous amino acids in the complete amino acid sequence of a secreted protein encoded by a human cDNA clone identified by a cDNA Clone Identifier in Table 1A and contained in the deposit with the ATCC Deposit Number shown for said cDNA clone in Table 1A.

[0979] Also preferred is a polypeptide wherein said sequence of contiguous amino acids is included in the amino acid sequence of a secreted portion of the secreted protein encoded by a human cDNA clone identified by a cDNA Clone Identifier in Table 1A and contained in the deposit with the ATCC Deposit Number shown for said cDNA clone in Table 1A.

[0980] Also preferred is an isolated polypeptide comprising an amino acid sequence at least 95% identical to a sequence of at least about 30 contiguous amino acids in the amino acid sequence of the secreted portion of the protein encoded by a human cDNA clone identified by a cDNA Clone Identifier in Table 1A and contained in the deposit with the ATCC Deposit Number shown for said cDNA clone in Table 1A.

[0981] Also preferred is an isolated polypeptide comprising an amino acid sequence at least 95% identical to a sequence of at least about 100 contiguous amino acids in the amino acid sequence of the secreted portion of the protein encoded by a human cDNA clone identified by a cDNA Clone Identifier in Table 1A and contained in the deposit with the ATCC Deposit Number shown for said cDNA clone in Table 1A.

[0982] Also preferred is an isolated polypeptide comprising an amino acid sequence at least 95% identical to the amino acid sequence of the secreted portion of the protein encoded by a human cDNA clone identified by a cDNA Clone Identifier in Table 1A and contained in the deposit with the ATCC Deposit Number shown for said cDNA clone in Table 1A.

[0983] Further preferred is an isolated antibody which binds specifically to a polypeptide comprising an amino acid sequence that is at least 90% identical to a sequence of at least 10 contiguous amino acids in a sequence selected from the group consisting of: an amino acid sequence of SEQ ID NO:Y wherein Y is any integer as defined in Table 1A; and a complete amino acid sequence of a protein encoded by a human cDNA clone identified by a cDNA Clone Identifier in Table 1A and contained in the deposit with the ATCC Deposit Number shown for said cDNA clone in Table 1A.

[0984] Further preferred is a method for detecting in a biological sample a polypeptide comprising an amino acid sequence which is at least 90% identical to a sequence of at least 10 contiguous amino acids in a sequence selected from the group consisting of: an amino acid sequence of SEQ ID NO:Y wherein Y is any integer as defined in Table 1A; and a complete amino acid sequence of a protein encoded by a human cDNA clone identified by a cDNA Clone Identifier in Table 1A and contained in the deposit with the ATCC Deposit Number shown for said cDNA clone in Table 1A; which method comprises a step of comparing an amino acid sequence of at least one polypeptide molecule in said sample with a sequence selected from said group and determining whether the sequence of said polypeptide molecule in said sample is at least 90% identical to said sequence of at least 10 contiguous amino acids.

[0985] Also preferred is the above method wherein said step of comparing an amino acid sequence of at least one polypeptide molecule in said sample with a sequence selected from said group comprises determining the extent of specific binding of polypeptides in said sample to an antibody which binds specifically to a polypeptide comprising an amino acid sequence that is at least 90% identical to a sequence of at least 10 contiguous amino acids in a sequence selected from the group consisting of: an amino acid sequence of SEQ ID NO:Y wherein Y is any integer as defined in Table 1A; and a complete amino acid sequence of a protein encoded by a human cDNA clone identified by a cDNA Clone Identifier in Table 1A and contained in the deposit with the ATCC Deposit Number shown for said cDNA clone in Table 1A.

[0986] Also preferred is the above method wherein said step of comparing sequences is performed by comparing the amino acid sequence determined from a polypeptide molecule in said sample with said sequence selected from said group.

[0987] Also preferred is a method for identifying the species, tissue or cell type of a biological sample which method comprises a step of detecting polypeptide molecules in said sample, if any, comprising an amino acid sequence that is at least 90% identical to a sequence of at least 10 contiguous amino acids in a sequence selected from the group consisting of: an amino acid sequence of SEQ ID NO:Y wherein Y is any integer as defined in Table 1A; and a complete amino acid sequence of a secreted protein encoded by a human cDNA clone identified by a cDNA Clone Identifier in Table 1A and contained in the deposit with the ATCC Deposit Number shown for said cDNA clone in Table 1A.

[0988] Also preferred is the above method for identifying the species, tissue or cell type of a biological sample, which method comprises a step of detecting polypeptide molecules comprising an amino acid sequence in a panel of at least two amino acid sequences, wherein at least one sequence in said panel is at least 90% identical to a sequence of at least 10 contiguous amino acids in a sequence selected from the above group.

[0989] Also preferred is a method for diagnosing in a subject a pathological condition associated with abnormal structure or expression of a gene encoding a secreted protein identified in Table 1A, which method comprises a step of detecting in a biological sample obtained from said subject polypeptide molecules comprising an amino acid sequence in a panel of at least two amino acid sequences, wherein at least one sequence in said panel is at least 90% identical to a sequence of at least 10 contiguous amino acids in a sequence selected from the group consisting of: an amino acid sequence of SEQ ID NO:Y wherein Y is any integer as defined in Table 1A; and a complete amino acid sequence of a secreted protein encoded by a human cDNA clone identified by a cDNA Clone Identifier in Table 1A and contained in the deposit with the ATCC Deposit Number shown for said cDNA clone in Table 1A.

[0990] In any of these methods, the step of detecting said polypeptide molecules includes using an antibody.

[0991] Also preferred is an isolated nucleic acid molecule comprising a nucleotide sequence which is at least 95% identical to a nucleotide sequence encoding a polypeptide wherein said polypeptide comprises an amino acid sequence that is at least 90% identical to a sequence of at least 10 contiguous amino acids in a sequence selected from the group consisting of: an amino acid sequence of SEQ ID NO:Y wherein Y is any integer as defined in Table 1A; and a complete amino acid sequence of a secreted protein encoded by a human cDNA clone identified by a cDNA Clone Identifier in Table 1A and contained in the deposit with the ATCC Deposit Number shown for said cDNA clone in Table 1A.

[0992] Also preferred is an isolated nucleic acid molecule, wherein said nucleotide sequence encoding a polypeptide has been optimized for expression of said polypeptide in a prokaryotic host.

[0993] Also preferred is an isolated nucleic acid molecule, wherein said polypeptide comprises an amino acid sequence selected from the group consisting of: an amino acid sequence of SEQ ID NO:Y wherein Y is any integer as defined in Table 1A; and a complete amino acid sequence of a secreted protein encoded by a human cDNA clone identified by a cDNA Clone Identifier in Table 1A and contained in the deposit with the ATCC Deposit Number shown for said cDNA clone in Table 1A.

[0994] Further preferred is a method of making a recombinant vector comprising inserting any of the above isolated nucleic acid molecule into a vector. Also preferred is the recombinant vector produced by this method. Also preferred is a method of making a recombinant host cell comprising introducing the vector into a host cell, as well as the recombinant host cell produced by this method.

[0995] Also preferred is a method of making an isolated polypeptide comprising culturing this recombinant host cell under conditions such that said polypeptide is expressed and recovering said polypeptide. Also preferred is this method of making an isolated polypeptide, wherein said recombinant host cell is a eukaryotic cell and said polypeptide is a secreted portion of a human secreted protein comprising an amino acid sequence selected from the group consisting of: an amino acid sequence of SEQ ID NO:Y beginning with the residue at the position of the First Amino Acid of the Secreted Portion of SEQ ID NO:Y wherein Y is an integer set forth in Table 1A and said position of the First Amino Acid of the Secreted Portion of SEQ ID NO:Y is defined in Table 1A; and an amino acid sequence of a secreted portion of a protein encoded by a human cDNA clone identified by a cDNA Clone Identifier in Table 1A and contained in the deposit with the ATCC Deposit Number shown for said cDNA clone in Table 1A. The isolated polypeptide produced by this method is also preferred.

[0996] Also preferred is a method of treatment of an individual in need of an increased level of a secreted protein activity, which method comprises administering to such an individual a pharmaceutical composition comprising an amount of an isolated polypeptide, polynucleotide, or antibody of the claimed invention effective to increase the level of said protein activity in said individual.

[0997] The above-recited applications have uses in a wide variety of hosts. Such hosts include, but are not limited to, human, murine, rabbit, goat, guinea pig, camel, horse, mouse, rat, hamster, pig, micro-pig, chicken, goat, cow, sheep, dog, cat, non-human primate, and human. In specific embodiments, the host is a mouse, rabbit, goat, guinea pig, chicken, rat, hamster, pig, sheep, dog or cat. In preferred embodiments, the host is a mammal. In most preferred embodiments, the host is a human.

[0998] Having generally described the invention, the same will be more readily understood by reference to the following examples, which are provided by way of illustration and are not intended as limiting.

### EXAMPLES

### Example 1

### Isolation of a Selected cDNA Clone from the Deposited Sample

[0999] Each cDNA clone in a cited ATCC deposit is contained in a plasmid vector. Table 1A identifies the vectors used to construct the cDNA library from which each clone was isolated. In many cases, the vector used to construct the library is a phage vector from which a plasmid has been excised. The table immediately below correlates the related plasmid for each phage vector used in constructing the cDNA library. For example, where a particular clone is identified in Table 1A as being isolated in the vector “Lambda Zap,” the corresponding deposited clone is in “pBluescript.”

| Vector Used to | Corresponding Deposited |
|---|---|
| Construct Library | Plasmid |
| Lambda Zap | pBluescript (pBS) |
| Uni-Zap XR | pBluescript (pBS) |
| Zap Express | pBK |
| lafmid BA | plafmid BA |
| pSport1 | pSport1 |
| pCMVSport 2.0 | pCMVSport 2.0 |
| pCMVSport 3.0 | pCMVSport 3.0 |
| pCR ® 2.1 | pCR ® 2.1 |

[1000] Vectors Lambda Zap (U.S. Pat. Nos. 5,128,256 and 5,286,636), Uni-Zap XR (U.S. Pat. Nos. 5,128,256 and 5,286,636), Zap Express (U.S. Pat. Nos. 5,128,256 and 5,286,636), pBluescript (pBS) (Short, J. M. et al., Nucleic Acids Res. 16:7583-7600 (1988); Alting-Mees, M. A. and Short, J. M., Nucleic Acids Res. 17:9494 (1989)) and pBK (Alting-Mees, M. A. et al., Strategies 5:58-61 (1992)) are commercially available from Stratagene Cloning Systems, Inc., 11011 N. Torrey Pines Road, La Jolla, Calif., 92037. pBS contains an ampicillin resistance gene and pBK contains a neomycin resistance gene. Both can be transformed into E. coli strain XL-1 Blue, also available from Stratagene. pBS comes in 4 forms SK+, SK−, KS+ and KS. The S and K refers to the orientation of the polylinker to the T7 and T3 primer sequences which flank the polylinker region (“S” is for SacI and “K” is for KpnI which are the first sites on each respective end of the linker). “+” or “−” refer to the orientation of the fl origin of replication (“ori”), such that in one orientation, single stranded rescue initiated from the fl ori generates sense strand DNA and in the other, antisense.

[1001] Vectors pSport1, pCMVSport 2.0 and pCMVSport 3.0, were obtained from Life Technologies, Inc., P.O. Box 6009, Gaithersburg, Md. 20897. All Sport vectors contain an ampicillin resistance gene and may be transformed into E. coli strain DH10B, also available from Life Technologies. (See, for instance, Gruber, C. E., et al., Focus 15:59 (1993).) Vector lafmid BA (Bento Soares, Columbia University, NY) contains an ampicillin resistance gene and can be transformed into E. coli strain XL-1 Blue. Vector pCR®2.1, which is available from Invitrogen, 1600 Faraday Avenue, Carlsbad, Calif. 92008, contains an ampicillin resistance gene and may be transformed into E. coli strain DH10B, available from Life Technologies. (See, for instance, Clark, J. M., Nuc. Acids Res. 16:9677-9686 (1988) and Mead, D. et al., Bio/Technology 9: (1991).) Preferably, a polynucleotide of the present invention does not comprise the phage vector sequences identified for the particular clone in Table 1A, as well as the corresponding plasmid vector sequences designated above.

[1002] The deposited material in the sample assigned the ATCC Deposit Number cited in Table 1A for any given cDNA clone also may contain one or more additional plasmids, each comprising a cDNA clone different from that given clone. Thus, deposits sharing the same ATCC Deposit Number contain at least a plasmid for each cDNA clone identified in Table 1A. Typically, each ATCC deposit sample cited in Table 1A comprises a mixture of approximately equal amounts (by weight) of about 50 plasmid DNAs, each containing a different cDNA clone; but such a deposit sample may include plasmids for more or less than 50 cDNA clones, up to about 500 cDNA clones.

[1003] Two approaches can be used to isolate a particular clone from the deposited sample of plasmid DNAs cited for that clone in Table 1A. First, a plasmid is directly isolated by screening the clones using a polynucleotide probe corresponding to SEQ ID NO:X.

[1004] Particularly, a specific polynucleotide with 30-40 nucleotides is synthesized using an Applied Biosystems DNA synthesizer according to the sequence reported. The oligonucleotide is labeled, for instance, with ³²P-γ-ATP using T4 polynucleotide kinase and purified according to routine methods. (E.g., Maniatis et al., Molecular Cloning: A Laboratory Manual, Cold Spring Harbor Press, Cold Spring, N.Y. (1982).) The plasmid mixture is transformed into a suitable host, as indicated above (such as XL-1 Blue (Stratagene)) using techniques known to those of skill in the art, such as those provided by the vector supplier or in related publications or patents cited above. The transformants are plated on 1.5% agar plates (containing the appropriate selection agent, e.g., ampicillin) to a density of about 150 transformants (colonies) per plate. These plates are screened using Nylon membranes according to routine methods for bacterial colony screening (e.g., Sambrook et al., Molecular Cloning: A Laboratory Manual, 2nd Edit., (1989), Cold Spring Harbor Laboratory Press, pages 1.93 to 1.104), or other techniques known to those of skill in the art.

[1005] Alternatively, two primers of 17-20 nucleotides derived from both ends of the SEQ ID NO:X (i.e., within the region of SEQ ID NO:X bounded by the 5′ NT and the 3′ NT of the clone defined in Table 1A) are synthesized and used to amplify the desired cDNA using the deposited cDNA plasmid as a template. The polymerase chain reaction is carried out under routine conditions, for instance, in 25 ul of reaction mixture with 0.5 ug of the above cDNA template. A convenient reaction mixture is 1.5-5 mM MgCl₂, 0.01% (w/v) gelatin, 20 uM each of dATP, dCTP, dGTP, dTTP, 25 pmol of each primer and 0.25 Unit of Taq polymerase. Thirty five cycles of PCR (denaturation at 94 degree C. for 1 min; annealing at 55 degree C. for 1 min; elongation at 72 degree C. for 1 min) are performed with a Perkin-Elmer Cetus automated thermal cycler. The amplified product is analyzed by agarose gel electrophoresis and the DNA band with expected molecular weight is excised and purified. The PCR product is verified to be the selected sequence by subcloning and sequencing the DNA product.

[1006] Several methods are available for the identification of the 5′ or 3′ non-coding portions of a gene which may not be present in the deposited clone. These methods include but are not limited to, filter probing, clone enrichment using specific probes, and protocols similar or identical to 5′ and 3′ “RACE” protocols which are well known in the art. For instance, a method similar to 5′ RACE is available for generating the missing 5′ end of a desired full-length transcript. (Fromont-Racine et al., Nucleic Acids Res. 21(7):1683-1684 (1993).)

[1007] Briefly, a specific RNA oligonucleotide is ligated to the 5′ ends of a population of RNA presumably containing full-length gene RNA transcripts. A primer set containing a primer specific to the ligated RNA oligonucleotide and a primer specific to a known sequence of the gene of interest is used to PCR amplify the 5′ portion of the desired full-length gene. This amplified product may then be sequenced and used to generate the full length gene.

[1008] This above method starts with total RNA isolated from the desired source, although poly-A+ RNA can be used. The RNA preparation can then be treated with phosphatase if necessary to eliminate 5′ phosphate groups on degraded or damaged RNA which may interfere with the later RNA ligase step. The phosphatase should then be inactivated and the RNA treated with tobacco acid pyrophosphatase in order to remove the cap structure present at the 5′ ends of messenger RNAs. This reaction leaves a 5′ phosphate group at the 5′ end of the cap cleaved RNA which can then be ligated to an RNA oligonucleotide using T4 RNA ligase.

[1009] This modified RNA preparation is used as a template for first strand cDNA synthesis using a gene specific oligonucleotide. The first strand synthesis reaction is used as a template for PCR amplification of the desired 5′ end using a primer specific to the ligated RNA oligonucleotide and a primer specific to the known sequence of the gene of interest. The resultant product is then sequenced and analyzed to confirm that the 5′ end sequence belongs to the desired gene.

### Example 2

### Isolation of Genomic Clones Corresponding to a Polynucleotide

[1010] A human genomic P1 library (Genomic Systems, Inc.) is screened by PCR using primers selected for the cDNA sequence corresponding to SEQ ID NO:X., according to the method described in Example 1. (See also, Sambrook.)

### Example 3

### Tissue Distribution of Polypeptide

[1011] Tissue distribution of mRNA expression of polynucleotides of the present invention is determined using protocols for Northern blot analysis, described by, among others, Sambrook et al. For example, a cDNA probe produced by the method described in Example 1 is labeled with P³² using the rediprime™ DNA labeling system (Amersham Life Science), according to manufacturer's instructions. After labeling, the probe is purified using CHROMA SPIN-100™ column (Clontech Laboratories, Inc.), according to manufacturer's protocol number PT1200-1. The purified labeled probe is then used to examine various human tissues for mRNA expression.

[1012] Multiple Tissue Northern (MTN) blots containing various human tissues (H) or human immune system tissues (IM) (Clontech) are examined with the labeled probe using ExpressHyb™ hybridization solution (Clontech) according to manufacturer's protocol number PT1190-1. Following hybridization and washing, the blots are mounted and exposed to film at −70 degree C. overnight, and the films developed according to standard procedures.

### Example 4

### Chromosomal Mapping of the Polynucleotides

[1013] An oligonucleotide primer set is designed according to the sequence at the 5′ end of SEQ ID NO:X. This primer preferably spans about 100 nucleotides. This primer set is then used in a polymerase chain reaction under the following set of conditions: 30 seconds, 95 degree C.; 1 minute, 56 degree C.; 1 minute, 70 degree C. This cycle is repeated 32 times followed by one 5 minute cycle at 70 degree C. Human, mouse, and hamster DNA is used as template in addition to a somatic cell hybrid panel containing individual chromosomes or chromosome fragments (Bios, Inc). The reactions is analyzed on either 8% polyacrylamide gels or 3.5% agarose gels. Chromosome mapping is determined by the presence of an approximately 100 bp PCR fragment in the particular somatic cell hybrid.

### Example 5

### Bacterial Expression of a Polypeptide

[1014] A polynucleotide encoding a polypeptide of the present invention is amplified using PCR oligonucleotide primers corresponding to the 5′ and 3′ ends of the DNA sequence, as outlined in Example 1, to synthesize insertion fragments. The primers used to amplify the cDNA insert should preferably contain restriction sites, such as BamHI and XbaI, at the 5′ end of the primers in order to clone the amplified product into the expression vector. For example, BamHI and XbaI correspond to the restriction enzyme sites on the bacterial expression vector pQE-9. (Qiagen, Inc., Chatsworth, Calif.). This plasmid vector encodes antibiotic resistance (Ampr), a bacterial origin of replication (ori), an IPTG-regulatable promoter/operator (P/O), a ribosome binding site (RBS), a 6-histidine tag (6-His), and restriction enzyme cloning sites.

[1015] The pQE-9 vector is digested with BamHI and XbaI and the amplified fragment is ligated into the pQE-9 vector maintaining the reading frame initiated at the bacterial RBS. The ligation mixture is then used to transform the E. coli strain M15/rep4 (Qiagen, Inc.) which contains multiple copies of the plasmid pREP4, which expresses the lacI repressor and also confers kanamycin resistance (Kan^{r}). Transformants are identified by their ability to grow on LB plates and ampicillin/kanamycin resistant colonies are selected. Plasmid DNA is isolated and confirmed by restriction analysis.

[1016] Clones containing the desired constructs are grown overnight (O/N) in liquid culture in LB media supplemented with both Amp (100 ug/ml) and Kan (25 ug/ml). The O/N culture is used to inoculate a large culture at a ratio of 1:100 to 1:250. The cells are grown to an optical density 600 (O.D.⁶⁰⁰) of between 0.4 and 0.6. IPTG (Isopropyl-B-D-thiogalacto pyranoside) is then added to a final concentration of 1 mM. IPTG induces by inactivating the lacI repressor, clearing the P/O leading to increased gene expression.

[1017] Cells are grown for an extra 3 to 4 hours. Cells are then harvested by centrifugation (20 mins at 6000×g). The cell pellet is solubilized in the chaotropic agent 6 Molar Guanidine HCl by stirring for 3-4 hours at 4 degree C. The cell debris is removed by centrifugation, and the supernatant containing the polypeptide is loaded onto a nickel-nitrilo-tri-acetic acid (“Ni-NTA”) affinity resin column (available from QIAGEN, Inc., supra). Proteins with a 6×His tag bind to the Ni-NTA resin with high affinity and can be purified in a simple one-step procedure (for details see: The QIAexpressionist (1995) QIAGEN, Inc., supra).

[1018] Briefly, the supernatant is loaded onto the column in 6 M guanidine-HCl, pH 8, the column is first washed with 10 volumes of 6 M guanidine-HCl, pH 8, then washed with 10 volumes of 6 M guanidine-HCl pH 6, and finally the polypeptide is eluted with 6 M guanidine-HCl, pH 5.

[1019] The purified protein is then renatured by dialyzing it against phosphate-buffered saline (PBS) or 50 mM Na-acetate, pH 6 buffer plus 200 mM NaCl. Alternatively, the protein can be successfully refolded while immobilized on the Ni-NTA column. The recommended conditions are as follows: renature using a linear 6M-1M urea gradient in 500 mM NaCl, 20% glycerol, 20 mM Tris/HCl pH 7.4, containing protease inhibitors. The renaturation should be performed over a period of 1.5 hours or more. After renaturation the proteins are eluted by the addition of 250 mM immidazole. Immidazole is removed by a final dialyzing step against PBS or 50 mM sodium acetate pH 6 buffer plus 200 mM NaCl. The purified protein is stored at 4 degree C. or frozen at −80 degree C.

[1020] In addition to the above expression vector, the present invention further includes an expression vector comprising phage operator and promoter elements operatively linked to a polynucleotide of the present invention, called pHE4a. (ATCC Accession Number 209645, deposited on Feb. 25, 1998.) This vector contains: 1) a neomycinphosphotransferase gene as a selection marker, 2) an E. coli origin of replication, 3) a T5 phage promoter sequence, 4) two lac operator sequences, 5) a Shine-Delgarno sequence, and 6) the lactose operon repressor gene (lacIq). The origin of replication (oriC) is derived from pUC19 (LTI, Gaithersburg, Md.). The promoter sequence and operator sequences are made synthetically.

[1021] DNA can be inserted into the pHEa by restricting the vector with NdeI and XbaI, BamHI, XhoI, or Asp718, running the restricted product on a gel, and isolating the larger fragment (the stuffer fragment should be about 310 base pairs). The DNA insert is generated according to the PCR protocol described in Example 1, using PCR primers having restriction sites for NdeI (5′ primer) and XbaI, BamHI, XhoI, or Asp718 (3′ primer). The PCR insert is gel purified and restricted with compatible enzymes. The insert and vector are ligated according to standard protocols.

[1022] The engineered vector could easily be substituted in the above protocol to express protein in a bacterial system.

### Example 6

### Purification of a Polypeptide from an Inclusion Body

[1023] The following alternative method can be used to purify a polypeptide expressed in E coli when it is present in the form of inclusion bodies. Unless otherwise specified, all of the following steps are conducted at 4-10 degree C.

[1024] Upon completion of the production phase of the E. coli fermentation, the cell culture is cooled to 4-10 degree C. and the cells harvested by continuous centrifugation at 15,000 rpm (Heraeus Sepatech). On the basis of the expected yield of protein per unit weight of cell paste and the amount of purified protein required, an appropriate amount of cell paste, by weight, is suspended in a buffer solution containing 100 mM Tris, 50 mM EDTA, pH 7.4. The cells are dispersed to a homogeneous suspension using a high shear mixer.

[1025] The cells are then lysed by passing the solution through a microfluidizer (Microfuidics, Corp. or APV Gaulin, Inc.) twice at 4000-6000 psi. The homogenate is then mixed with NaCl solution to a final concentration of 0.5 M NaCl, followed by centrifugation at 7000×g for 15 min. The resultant pellet is washed again using 0.5M NaCl, 100 mM Tris, 50 mM EDTA, pH 7.4.

[1026] The resulting washed inclusion bodies are solubilized with 1.5 M guanidine hydrochloride (GuHCl) for 2-4 hours. After 7000×g centrifugation for 15 min., the pellet is discarded and the polypeptide containing supernatant is incubated at 4 degree C. overnight to allow further GuHCl extraction.

[1027] Following high speed centrifugation (30,000×g) to remove insoluble particles, the GuHCl solubilized protein is refolded by quickly mixing the GuHCl extract with 20 volumes of buffer containing 50 mM sodium, pH 4.5, 150 mM NaCl, 2 mM EDTA by vigorous stirring. The refolded diluted protein solution is kept at 4 degree C. without mixing for 12 hours prior to further purification steps.

[1028] To clarify the refolded polypeptide solution, a previously prepared tangential filtration unit equipped with 0.16 um membrane filter with appropriate surface area (e.g., Filtron), equilibrated with 40 mM sodium acetate, pH 6.0 is employed. The filtered sample is loaded onto a cation exchange resin (e.g., Poros HS-50, Perseptive Biosystems). The column is washed with 40 mM sodium acetate, pH 6.0 and eluted with 250 mM, 500 mM, 1000 mM, and 1500 mM NaCl in the same buffer, in a stepwise manner. The absorbance at 280 nm of the effluent is continuously monitored. Fractions are collected and further analyzed by SDS-PAGE.

[1029] Fractions containing the polypeptide are then pooled and mixed with 4 volumes of water. The diluted sample is then loaded onto a previously prepared set of tandem columns of strong anion (Poros HQ-50, Perseptive Biosystems) and weak anion (Poros CM-20, Perseptive Biosystems) exchange resins. The columns are equilibrated with 40 mM sodium acetate, pH 6.0. Both columns are washed with 40 mM sodium acetate, pH 6.0, 200 mM NaCl. The CM-20 column is then eluted using a 10 column volume linear gradient ranging from 0.2 M NaCl, 50 mM sodium acetate, pH 6.0 to 1.0 M NaCl, 50 mM sodium acetate, pH 6.5. Fractions are collected under constant A₂₈₀ monitoring of the effluent. Fractions containing the polypeptide (determined, for instance, by 16% SDS-PAGE) are then pooled.

[1030] The resultant polypeptide should exhibit greater than 95% purity after the above refolding and purification steps. No major contaminant bands should be observed from Commassie blue stained 16% SDS-PAGE gel when 5 ug of purified protein is loaded. The purified protein can also be tested for endotoxin/LPS contamination, and typically the LPS content is less than 0.1 ng/ml according to LAL assays.

### Example 7

### Cloning and Expression of a Polypeptide in a Baculovirus Expression System

[1031] In this example, the plasmid shuttle vector pA2 is used to insert a polynucleotide into a baculovirus to express a polypeptide. This expression vector contains the strong polyhedrin promoter of the Autographa californica nuclear polyhedrosis virus (AcMNPV) followed by convenient restriction sites such as BamHI, Xba I and Asp718. The polyadenylation site of the simian virus 40 (“SV40”) is used for efficient polyadenylation. For easy selection of recombinant virus, the plasmid contains the beta-galactosidase gene from E. coli under control of a weak Drosophila promoter in the same orientation, followed by the polyadenylation signal of the polyhedrin gene. The inserted genes are flanked on both sides by viral sequences for cell-mediated homologous recombination with wild-type viral DNA to generate a viable virus that express the cloned polynucleotide.

[1032] Many other baculovirus vectors can be used in place of the vector above, such as pAc373, pVL941, and pAcIM1, as one skilled in the art would readily appreciate, as long as the construct provides appropriately located signals for transcription, translation, secretion and the like, including a signal peptide and an in-frame AUG as required. Such vectors are described, for instance, in Luckow et al., Virology 170:31-39 (1989).

[1033] Specifically, the cDNA sequence contained in the deposited clone, including the AUG initiation codon and the naturally associated leader sequence identified in Table 1A, is amplified using the PCR protocol described in Example 1. If the naturally occurring signal sequence is used to produce the secreted protein, the pA2 vector does not need a second signal peptide. Alternatively, the vector can be modified (pA2 GP) to include a baculovirus leader sequence, using the standard methods described in Summers et al., “A Manual of Methods for Baculovirus Vectors and Insect Cell Culture Procedures,” Texas Agricultural Experimental Station Bulletin No. 1555 (1987).

[1034] The amplified fragment is isolated from a 1% agarose gel using a commercially available kit (“Geneclean,” BIO 101 Inc., La Jolla, Calif.). The fragment then is digested with appropriate restriction enzymes and again purified on a 1% agarose gel.

[1035] The plasmid is digested with the corresponding restriction enzymes and optionally, can be dephosphorylated using calf intestinal phosphatase, using routine procedures known in the art. The DNA is then isolated from a 1% agarose gel using a commercially available kit (“Geneclean” BIO 101 Inc., La Jolla, Calif.).

[1036] The fragment and the dephosphorylated plasmid are ligated together with T4 DNA ligase. E. coli HB101 or other suitable E. coli hosts such as XL-1 Blue (Stratagene Cloning Systems, La Jolla, Calif.) cells are transformed with the ligation mixture and spread on culture plates. Bacteria containing the plasmid are identified by digesting DNA from individual colonies and analyzing the digestion product by gel electrophoresis. The sequence of the cloned fragment is confirmed by DNA sequencing.

[1037] Five ug of a plasmid containing the polynucleotide is co-transfected with 1.0 ug of a commercially available linearized baculovirus DNA (“BaculoGold™ baculovirus DNA”, Pharmingen, San Diego, Calif.), using the lipofection method described by Felgner et al., Proc. Natl. Acad. Sci. USA 84:7413-7417 (1987). One ug of BaculoGold™ virus DNA and 5 ug of the plasmid are mixed in a sterile well of a microtiter plate containing 50 ul of serum-free Grace's medium (Life Technologies Inc., Gaithersburg, Md.). Afterwards, 10 ul Lipofectin plus 90 ul Grace's medium are added, mixed and incubated for 15 minutes at room temperature. Then the transfection mixture is added drop-wise to Sf9 insect cells (ATCC CRL 1711) seeded in a 35 mm tissue culture plate with 1 ml Grace's medium without serum. The plate is then incubated for 5 hours at 27 degrees C. The transfection solution is then removed from the plate and 1 ml of Grace's insect medium supplemented with 10% fetal calf serum is added. Cultivation is then continued at 27 degrees C. for four days.

[1038] After four days the supernatant is collected and a plaque assay is performed, as described by Summers and Smith, supra. An agarose gel with “Blue Gal” (Life Technologies Inc., Gaithersburg) is used to allow easy identification and isolation of gal-expressing clones, which produce blue-stained plaques. (A detailed description of a “plaque assay” of this type can also be found in the user's guide for insect cell culture and baculovirology distributed by Life Technologies Inc., Gaithersburg, page 9-10.) After appropriate incubation, blue stained plaques are picked with the tip of a micropipettor (e.g., Eppendorf). The agar containing the recombinant viruses is then resuspended in a microcentrifuge tube containing 200 ul of Grace's medium and the suspension containing the recombinant baculovirus is used to infect Sf9 cells seeded in 35 mm dishes. Four days later the supernatants of these culture dishes are harvested and then they are stored at 4 degree C.

[1039] To verify the expression of the polypeptide, Sf9 cells are grown in Grace's medium supplemented with 10% heat-inactivated FBS. The cells are infected with the recombinant baculovirus containing the polynucleotide at a multiplicity of infection (“MOI”) of about 2. If radiolabeled proteins are desired, 6 hours later the medium is removed and is replaced with SF900 II medium minus methionine and cysteine (available from Life Technologies Inc., Rockville, Md.). After 42 hours, 5 uCi of ³⁵S-methionine and 5 uCi ³⁵S-cysteine (available from Amersham) are added. The cells are further incubated for 16 hours and then are harvested by centrifugation. The proteins in the supernatant as well as the intracellular proteins are analyzed by SDS-PAGE followed by autoradiography (if radiolabeled).

[1040] Microsequencing of the amino acid sequence of the amino terminus of purified protein may be used to determine the amino terminal sequence of the produced protein.

### Example 8

### Expression of a Polypeptide in Mammalian Cells

[1041] The polypeptide of the present invention can be expressed in a mammalian cell. A typical mammalian expression vector contains a promoter element, which mediates the initiation of transcription of mRNA, a protein coding sequence, and signals required for the termination of transcription and polyadenylation of the transcript. Additional elements include enhancers, Kozak sequences and intervening sequences flanked by donor and acceptor sites for RNA splicing. Highly efficient transcription is achieved with the early and late promoters from SV40, the long terminal repeats (LTRs) from Retroviruses, e.g., RSV, HTLVI, HIVI and the early promoter of the cytomegalovirus (CMV). However, cellular elements can also be used (e.g., the human actin promoter).

[1042] Suitable expression vectors for use in practicing the present invention include, for example, vectors such as pSVL and pMSG (Pharmacia, Uppsala, Sweden), pRSVcat (ATCC 37152), pSV2dhfr (ATCC 37146), pBC12MI (ATCC 67109), pCMVSport 2.0, and pCMVSport 3.0. Mammalian host cells that could be used include, human Hela, 293, H9 and Jurkat cells, mouse NIH3T3 and C127 cells, Cos 1, Cos 7 and CV1, quail QC1-3 cells, mouse L cells and Chinese hamster ovary (CHO) cells.

[1043] Alternatively, the polypeptide can be expressed in stable cell lines containing the polynucleotide integrated into a chromosome. The co-transfection with a selectable marker such as dhfr, gpt, neomycin, hygromycin allows the identification and isolation of the transfected cells.

[1044] The transfected gene can also be amplified to express large amounts of the encoded protein. The DHFR (dihydrofolate reductase) marker is useful in developing cell lines that carry several hundred or even several thousand copies of the gene of interest. (See, e.g., Alt, F. W., et al., J. Biol. Chem. 253:1357-1370 (1978); Hamlin, J. L. and Ma, C., Biochem. et Biophys. Acta, 1097:107-143 (1990); Page, M. J. and Sydenham, M. A., Biotechnology 9:64-68 (1991).) Another useful selection marker is the enzyme glutamine synthase (GS) (Murphy et al., Biochem J. 227:277-279 (1991); Bebbington et al., Bio/Technology 10:169-175 (1992). Using these markers, the mammalian cells are grown in selective medium and the cells with the highest resistance are selected. These cell lines contain the amplified gene(s) integrated into a chromosome. Chinese hamster ovary (CHO) and NSO cells are often used for the production of proteins.

[1045] Derivatives of the plasmid pSV2-dhfr (ATCC Accession No. 37146), the expression vectors pC4 (ATCC Accession No. 209646) and pC6 (ATCC Accession No.209647) contain the strong promoter (LTR) of the Rous Sarcoma Virus (Cullen et al., Molecular and Cellular Biology, 438-447 (March, 1985)) plus a fragment of the CMV-enhancer (Boshart et al., Cell 41:521-530 (1985).) Multiple cloning sites, e.g., with the restriction enzyme cleavage sites BamHI, XbaI and Asp718, facilitate the cloning of the gene of interest. The vectors also contain the 3′ intron, the polyadenylation and termination signal of the rat preproinsulin gene, and the mouse DHFR gene under control of the SV40 early promoter.

[1046] Specifically, the plasmid pC6, for example, is digested with appropriate restriction enzymes and then dephosphorylated using calf intestinal phosphates by procedures known in the art. The vector is then isolated from a 1% agarose gel.

[1047] A polynucleotide of the present invention is amplified according to the protocol outlined in Example 1. If the naturally occurring signal sequence is used to produce the secreted protein, the vector does not need a second signal peptide. Alternatively, if the naturally occurring signal sequence is not used, the vector can be modified to include a heterologous signal sequence. (See, e.g., WO 96/34891.)

[1048] The amplified fragment is isolated from a 1% agarose gel using a commercially available kit (“Geneclean,” BIO 101 Inc., La Jolla, Calif.). The fragment then is digested with appropriate restriction enzymes and again purified on a 1% agarose gel.

[1049] The amplified fragment is then digested with the same restriction enzyme and purified on a 1% agarose gel. The isolated fragment and the dephosphorylated vector are then ligated with T4 DNA ligase. E. coli HB101 or XL-1 Blue cells are then transformed and bacteria are identified that contain the fragment inserted into plasmid pC6 using, for instance, restriction enzyme analysis.

[1050] Chinese hamster ovary cells lacking an active DHFR gene is used for transfection. Five μg of the expression plasmid pC6 a pC4 is cotransfected with 0.5 ug of the plasmid pSVneo using lipofectin (Felgner et al., supra). The plasmid pSV2-neo contains a dominant selectable marker, the neo gene from Tn5 encoding an enzyme that confers resistance to a group of antibiotics including G418. The cells are seeded in alpha minus MEM supplemented with 1 mg/ml G418. After 2 days, the cells are trypsinized and seeded in hybridoma cloning plates (Greiner, Germany) in alpha minus MEM supplemented with 10, 25, or 50 ng/ml of metothrexate plus 1 mg/ml G418. After about 10-14 days single clones are trypsinized and then seeded in 6-well petri dishes or 10 ml flasks using different concentrations of methotrexate (50 nM, 100 nM, 200 nM, 400 nM, 800 nM). Clones growing at the highest concentrations of methotrexate are then transferred to new 6-well plates containing even higher concentrations of methotrexate (1 uM, 2 uM, 5 uM, 10 mM, 20 mM). The same procedure is repeated until clones are obtained which grow at a concentration of 100-200 uM. Expression of the desired gene product is analyzed, for instance, by SDS-PAGE and Western blot or by reversed phase HPLC analysis.

### Example 9

### Protein Fusions

[1051] The polypeptides of the present invention are preferably fused to other proteins. These fusion proteins can be used for a variety of applications. For example, fusion of the present polypeptides to His-tag, HA-tag, protein A, IgG domains, and maltose binding protein facilitates purification. (See Example 5; see also EP A 394,827; Traunecker, et al., Nature 331:84-86 (1988).) Similarly, fusion to IgG-1, IgG-3, and albumin increases the halflife time in vivo. Nuclear localization signals fused to the polypeptides of the present invention can target the protein to a specific subcellular localization, while covalent heterodimer or homodimers can increase or decrease the activity of a fusion protein. Fusion proteins can also create chimeric molecules having more than one function. Finally, fusion proteins can increase solubility and/or stability of the fused protein compared to the non-fused protein. All of the types of fusion proteins described above can be made by modifying the following protocol, which outlines the fusion of a polypeptide to an IgG molecule, or the protocol described in Example 5.

[1052] Briefly, the human Fc portion of the IgG molecule can be PCR amplified, using primers that span the 5′ and 3′ ends of the sequence described below. These primers also should have convenient restriction enzyme sites that will facilitate cloning into an expression vector, preferably a mammalian expression vector.

[1053] For example, if pC4 (Accession No. 209646) is used, the human Fc portion can be ligated into the BamHI cloning site. Note that the 3′ BamHI site should be destroyed. Next, the vector containing the human Fc portion is re-restricted with BamHI, linearizing the vector, and a polynucleotide of the present invention, isolated by the PCR protocol described in Example 1, is ligated into this BamHI site. Note that the polynucleotide is cloned without a stop codon, otherwise a fusion protein will not be produced.

[1054] If the naturally occurring signal sequence is used to produce the secreted protein, pC4 does not need a second signal peptide. Alternatively, if the naturally occurring signal sequence is not used, the vector can be modified to include a heterologous signal sequence. (See, e.g., WO 96/34891.)

| | |
|---|---|
| Human IgG Fc region: | |
| GGGATCCGGAGCCCAAATCTTCTGACAAAACTCACACATGCCCACCGT | (SEQ ID NO:1) |
| GCCCAGCACCTGAATTCGAGGGTGCACCGTCAGTCTTCCTCTTCCCCCCAAAA | |
| CCCAAGGACACCCTCATGATCTCCCGGACTCCTGAGGTCACATGCGTGGTGGT | |
| GGACGTAAGCCACGAAGACCCTGAGGTCAAGTTCAACTGGTACGTGGACGGC | |
| GTGGAGGTGCATAATGCCAAGACAAAGCCGCGGGAGGAGCAGTACAACAGCA | |
| CGTACCGTGTGGTCAGCGTCCTCACCGTCCTGCACCAGGACTGGCTGAATGGC | |
| AAGGAGTACAAGTGCAAGGTCTCCAACAAAGCCCTCCCAACCCCCATCGAGA | |
| AAACCATCTCCAAAGCCAAAGGGCAGCCCCGAGAACCACAGGTGTACACCCT | |
| GCCCCCATCCCGGGATGAGCTGACCAAGAACCAGGTCAGCCTGACCTGCCTGG | |
| TCAAAGGCTTCTATCCAAGCGACATCGCCGTGGAGTGGGAGAGCAATGGGCA | |
| GCCGGAGAACAACTACAAGACCACGCCTCCCGTGCTGGACTCCGACGGCTCCT | |
| TCTTCCTCTACAGCAAGCTCACCGTGGACAAGAGCAGGTGGCAGCAGGGGAA | |
| CGTCTTCTCATGCTCCGTGATGCATGAGGCTCTGCACAACCACTACACGCAGA | |
| AGAGCCTCTCCCTGTCTCCGGGTAAATGAGTGCGACGGCCGCGACTCTAGAGG | |
| AT | |

### Example 10

### Production of an Antibody from a Polypeptide

[1055] The antibodies of the present invention can be prepared by a variety of methods. (See, Current Protocols, Chapter 2.) As one example of such methods, cells expressing a polypeptide of the present invention is administered to an animal to induce the production of sera containing polyclonal antibodies. In a preferred method, a preparation of the secreted protein is prepared and purified to render it substantially free of natural contaminants. Such a preparation is then introduced into an animal in order to produce polyclonal antisera of greater specific activity.

[1056] In the most preferred method, the antibodies of the present invention are monoclonal antibodies (or protein binding fragments thereof). Such monoclonal antibodies can be prepared using hybridoma technology. (Köhler et al., Nature 256:495 (1975); Köhler et al., Eur. J. Immunol. 6:511 (1976); Köhler et al., Eur. J. Immunol. 6:292 (1976); Hammerling et al., in: Monoclonal Antibodies and T-Cell Hybridomas, Elsevier, N.Y., pp. 563-681 (1981).) In general, such procedures involve immunizing an animal (preferably a mouse) with polypeptide or, more preferably, with a secreted polypeptide-expressing cell. Such cells may be cultured in any suitable tissue culture medium; however, it is preferable to culture cells in Earle's modified Eagle's medium supplemented with 10% fetal bovine serum (inactivated at about 56 degrees C.), and supplemented with about 10 g/l of nonessential amino acids, about 1,000 U/ml of penicillin, and about 100 ug/ml of streptomycin.

[1057] The splenocytes of such mice are extracted and fused with a suitable myeloma cell line. Any suitable myeloma cell line may be employed in accordance with the present invention; however, it is preferable to employ the parent myeloma cell line (SP20), available from the ATCC. After fusion, the resulting hybridoma cells are selectively maintained in HAT medium, and then cloned by limiting dilution as described by Wands et al. (Gastroenterology 80:225-232 (1981).) The hybridoma cells obtained through such a selection are then assayed to identify clones which secrete antibodies capable of binding the polypeptide.

[1058] Alternatively, additional antibodies capable of binding to the polypeptide can be produced in a two-step procedure using anti-idiotypic antibodies. Such a method makes use of the fact that antibodies are themselves antigens, and therefore, it is possible to obtain an antibody which binds to a second antibody. In accordance with this method, protein specific antibodies are used to immunize an animal, preferably a mouse. The splenocytes of such an animal are then used to produce hybridoma cells, and the hybridoma cells are screened to identify clones which produce an antibody whose ability to bind to the protein-specific antibody can be blocked by the polypeptide. Such antibodies comprise anti-idiotypic antibodies to the protein-specific antibody and can be used to immunize an animal to induce formation of further protein-specific antibodies.

[1059] It will be appreciated that Fab and F(ab′)2 and other fragments of the antibodies of the present invention may be used according to the methods disclosed herein. Such fragments are typically produced by proteolytic cleavage, using enzymes such as papain (to produce Fab fragments) or pepsin (to produce F(ab′)2 fragments). Alternatively, secreted protein-binding fragments can be produced through the application of recombinant DNA technology or through synthetic chemistry.

[1060] For in vivo use of antibodies in humans, it may be preferable to use “humanized” chimeric monoclonal antibodies. Such antibodies can be produced using genetic constructs derived from hybridoma cells producing the monoclonal antibodies described above. Methods for producing chimeric antibodies are known in the art. (See, for review, Morrison, Science 229:1202 (1985); Oi et al., BioTechniques 4:214 (1986); Cabilly et al., U.S. Pat. No. 4,816,567; Taniguchi et al., EP 171496; Morrison et al., EP 173494; Neuberger et al., WO 8601533; Robinson et al., WO 8702671; Boulianne et al., Nature 312:643 (1984); Neuberger et al., Nature 314:268 (1985).)

### Example 11

### Production of Secreted Protein for High-Throughput Screening Assays

[1061] The following protocol produces a supernatant containing a polypeptide to be tested. This supernatant can then be used in the Screening Assays described herein.

[1062] First, dilute Poly-D-Lysine (644 587 Boehringer-Mannheim) stock solution (1 mg/ml in PBS) 1:20 in PBS (w/o calcium or magnesium 17-516F Biowhittaker) for a working solution of 50 ug/ml. Add 200 ul of this solution to each well (24 well plates) and incubate at RT for 20 minutes. Be sure to distribute the solution over each well (note: a 12-channel pipetter may be used with tips on every other channel). Aspirate off the Poly-D-Lysine solution and rinse with 1 ml PBS (Phosphate Buffered Saline). The PBS should remain in the well until just prior to plating the cells and plates may be poly-lysine coated in advance for up to two weeks.

[1063] Plate 293T cells (do not carry cells past P+20) at 2×10⁵ cells/well in 0.5 ml DMEM (Dulbecco's Modified Eagle Medium)(with 4.5 G/L glucose and L-glutamine (12-604F Biowhittaker))/10% heat inactivated FBS(14-503F Biowhittaker)/1× Penstrep(17-602E Biowhittaker). Let the cells grow overnight.

[1064] The next day, mix together in a sterile solution basin: 300 ul Lipofectamine (18324-012 Gibco/BRL) and 5 ml Optimem I (31985070 Gibco/BRL)/96-well plate. With a small volume multi-channel pipetter, aliquot approximately 2 ug of an expression vector containing a polynucleotide insert, produced by the methods described in Examples 8 or 9, into an appropriately labeled 96-well round bottom plate. With a multi-channel pipetter, add 50 ul of the Lipofectamine/Optimem I mixture to each well. Pipette up and down gently to mix. Incubate at R_{T} 15-45 minutes. After about 20 minutes, use a multi-channel pipetter to add 150 ul Optimem I to each well. As a control, one plate of vector DNA lacking an insert should be transfected with each set of transfections.

[1065] Preferably, the transfection should be performed by tag-teaming the following tasks. By tag-teaming, hands on time is cut in half, and the cells do not spend too much time on PBS. First, person A aspirates off the media from four 24-well plates of cells, and then person B rinses each well with 0.5-1 ml PBS. Person A then aspirates off PBS rinse, and person B, using a12-channel pipetter with tips on every other channel, adds the 200 ul of DNA/Lipofectamine/Optimem I complex to the odd wells first, then to the even wells, to each row on the 24-well plates. Incubate at 37 degrees C. for 6 hours.

[1066] While cells are incubating, prepare appropriate media, either 1% BSA in DMEM with 1× penstrep, or CHO-5 media (116.6 mg/L of CaCl₂ (anhyd); 0.00130 mg/L CuSO₄-5H₂O; 0.050 mg/L of Fe(NO₃)₃-9H₂O; 0.417 mg/L of FeSO₄.7H₂O; 311.80 mg/L of Kcl; 28.64 mg/L of MgCl₂; 48.84 mg/L of MgSO₄; 6995.50 mg/L of NaCl; 2400.0 mg/L of NaHCO₃; 62.50 mg/L of NaH₂PO₄.H₂O; 71.02 mg/L of Na₂HPO4; 4320 mg/L of ZnSO₄-7H₂O; 0.002 mg/L of Arachidonic Acid; 1.022 mg/L of Cholesterol; 0.070 mg/L of DL-alpha-Tocopherol-Acetate; 0.0520 mg/L of Linoleic Acid; 0.010 mg/L of Linolenic Acid; 0.010 mg/L of Myristic Acid; 0.010 mg/L of Oleic Acid; 0.010 mg/L of Palmitric Acid; 0.010 mg/L of Palmitic Acid; 100 mg/L of Pluronic F-68; 0.010 mg/L of Stearic Acid; 2.20 mg/L of Tween 80; 4551 mg/L of D-Glucose; 130.85 mg/ml of L-Alanine; 147.50 mg/ml of L-Arginine-HCL; 7.50 mg/ml of L-Asparagine-H₂O; 6.65 mg/ml of L-Aspartic Acid; 29.56 mg/ml of L-Cystine-2HCL-H₂O; 31.29 mg/ml of L-Cystine-2HCL; 7.35 mg/ml of L-Glutamic Acid; 365.0 mg/ml of L-Glutamine; 18.75 mg/ml of Glycine; 52.48 mg/ml of L-Histidine-HCL-H₂O; 106.97 mg/ml of L-Isoleucine; 111.45 mg/ml of L-Leucine; 163.75 mg/ml of L-Lysine HCL; 32.34 mg/ml of L-Methionine; 68.48 mg/ml of L-Phenylalainine; 40.0 mg/ml of L-Proline; 26.25 mg/ml of L-Serine; 101.05 mg/ml of L-Threonine; 19.22 mg/ml of L-Tryptophan; 91.79 mg/ml of L-Tryrosine-2Na-2H₂O; 99.65 mg/ml of L-Valine; 0.0035 mg/L of Biotin; 3.24 mg/L of D-Ca Pantothenate; 11.78 mg/L of Choline Chloride; 4.65 mg/L of Folic Acid; 15.60 mg/L of i-Inositol; 3.02 mg/L of Niacinamide; 3.00 mg/L of Pyridoxal HCL; 0.031 mg/L of Pyridoxine HCL; 0.319 mg/L of Riboflavin; 3.17 mg/L of Thiamine HCL; 0.365 mg/L of Thymidine; and 0.680 mg/L of Vitamin B₁₂; 25 mM of HEPES Buffer; 2.39 mg/L of Na Hypoxanthine; 0.105 mg/L of Lipoic Acid; 0.081 mg/L of Sodium Putrescine-2HCL; 55.0 mg/L of Sodium Pyruvate; 0.0067 mg/L of Sodium Selenite; 20 uM of Ethanolamine; 0.122 mg/L of Ferric Citrate; 41.70 mg/L of Methyl-B-Cyclodextrin complexed with Linoleic Acid; 33.33 mg/L of Methyl-B-Cyclodextrin complexed with Oleic Acid; and 10 mg/L of Methyl-B-Cyclodextrin complexed with Retinal) with 2 mm glutamine and 1× penstrep. (BSA (81-068-3 Bayer) 100 gm dissolved in IL DMEM for a 10% BSA stock solution). Filter the media and collect 50 ul for endotoxin assay in 15 ml polystyrene conical.

[1067] The transfection reaction is terminated, preferably by tag-teaming, at the end of the incubation period. Person A aspirates off the transfection media, while person B adds 1.5 ml appropriate media to each well. Incubate at 37 degrees C. for 45 or 72 hours depending on the media used: 1% BSA for 45 hours or CHO-5 for 72 hours.

[1068] On day four, using a 300 ul multichannel pipetter, aliquot 600 ul in one 1 ml deep well plate and the remaining supernatant into a 2 ml deep well. The supernatants from each well can then be used in the assays described in Examples 13-20.

[1069] It is specifically understood that when activity is obtained in any of the assays described below using a supernatant, the activity originates from either the polypeptide directly (e.g., as a secreted protein) or by the polypeptide inducing expression of other proteins, which are then secreted into the supernatant. Thus, the invention further provides a method of identifying the protein in the supernatant characterized by an activity in a particular assay.

### Example 12

### Construction of GAS Reporter Construct

[1070] One signal transduction pathway involved in the differentiation and proliferation of cells is called the Jaks-STATs pathway. Activated proteins in the Jaks-STATs pathway bind to gamma activation site “GAS” elements or interferon-sensitive responsive element (“ISRE”), located in the promoter of many genes. The binding of a protein to these elements alter the expression of the associated gene.

[1071] GAS and ISRE elements are recognized by a class of transcription factors called Signal Transducers and Activators of Transcription, or “STATs.” There are six members of the STATs family. Stat1 and Stat3 are present in many cell types, as is Stat2 (as response to IFN-alpha is widespread). Stat4 is more restricted and is not in many cell types though it has been found in T helper class I, cells after treatment with IL-12. Stat5 was originally called mammary growth factor, but has been found at higher concentrations in other cells including myeloid cells. It can be activated in tissue culture cells by many cytokines.

[1072] The STATs are activated to translocate from the cytoplasm to the nucleus upon tyrosine phosphorylation by a set of kinases known as the Janus Kinase (“Jaks”) family. Jaks represent a distinct family of soluble tyrosine kinases and include Tyk2, Jak1, Jak2, and Jak3. These kinases display significant sequence similarity and are generally catalytically inactive in resting cells.

[1073] The Jaks are activated by a wide range of receptors summarized in the Table below. (Adapted from review by Schidler and Darnell, Ann. Rev. Biochem. 64:621-51 (1995).) A cytokine receptor family, capable of activating Jaks, is divided into two groups:
[1074] (a) Class 1 includes receptors for IL-2, IL-3, IL-4, IL-6, IL-7, IL-9, IL-11, IL-12, IL-15, Epo, PRL, GH, G-CSF, GM-CSF, LIF, CNTF, and thrombopoietin; and (b) Class 2 includes IFN-a, IFN-g, and IL-10. The Class 1 receptors share a conserved cysteine motif (a set of four conserved cysteines and one tryptophan) and a WSXWS motif (a membrane proximal region encoding Trp-Ser-Xxx-Trp-Ser (SEQ ID NO:2)).

[1075] Thus, on binding of a ligand to a receptor, Jaks are activated, which in turn activate STATs, which then translocate and bind to GAS elements. This entire process is encompassed in the Jaks-STATs signal transduction pathway.

[1076] Therefore, activation of the Jaks-STATs pathway, reflected by the binding of the GAS or the ISRE element, can be used to indicate proteins involved in the proliferation and differentiation of cells. For example, growth factors and cytokines are known to activate the Jaks-STATs pathway. (See Table below.) Thus, by using GAS elements linked to reporter molecules, activators of the Jaks-STATs pathway can be identified.

| | JAKs | | | | | |
|---|---|---|---|---|---|---|
| Ligand | tyk2 | Jak1 | Jak2 | Jak3 | STATS | GAS(elements) or ISRE |
| IFN family | | | | | | |
| IFN-a/B | + | + | − | − | 1, 2, 3 | ISRE |
| IFN-g | | + | + | − | 1 | GAS (IRF1 > Lys6 > IFP) |
| Il-10 | + | ? | ? | − | 1, 3 | |
| gp130 family | | | | | | |
| IL-6 (Pleiotrophic) | + | + | + | ? | 1, 3 | GAS (IRF1 > Lys6 > IFP) |
| Il-11(Pleiotrophic) | ? | + | ? | ? | 1, 3 | |
| OnM(Pleiotrophic) | ? | + | + | ? | 1, 3 | |
| LIF(Pleiotrophic) | ? | + | + | ? | 1, 3 | |
| CNTF(Pleiotrophic) | −/+ | + | + | ? | 1, 3 | |
| G-CSF(Pleiotrophic) | ? | + | ? | ? | 1, 3 | |
| IL-12(Pleiotrophic) | + | − | + | + | 1, 3 | |
| g-C family | | | | | | |
| IL-2 (lymphocytes) | − | + | − | + | 1, 3, 5 | GAS |
| IL-4 (lymph/myeloid) | − | + | − | + | 6 | GAS (IRF1 = IFP >> Ly6) |
| | | | | | | (IgH) |
| IL-7 (lymphocytes) | − | + | − | + | 5 | GAS |
| IL-9 (lymphocytes) | − | + | − | + | 5 | GAS |
| IL-13 (lymphocyte) | − | + | ? | ? | 6 | GAS |
| IL-15 | ? | + | ? | + | 5 | GAS |
| gp140 family | | | | | | |
| IL-3 (myeloid) | − | − | + | − | 5 | GAS (IRF1 > IFP >> Ly6) |
| IL-5 (myeloid) | − | − | + | − | 5 | GAS |
| GM-CSF (myeloid) | − | − | + | − | 5 | GAS |
| Growth hormone family | | | | | | |
| GH | ? | − | + | − | 5 | |
| PRL | ? | +/− | + | − | 1, 3, 5 | |
| EPO | ? | − | + | − | 5 | GAS(B- |
| | | | | | | CAS > IRF1 = IFP >> Ly6) |
| Receptor Tyrosine Kinases | | | | | | |
| EGF | ? | + | + | − | 1, 3 | GAS (IRF1) |
| PDGF | ? | + | + | − | 1, 3 | |
| CSF-1 | ? | + | + | − | 1, 3 | GAS (not IRF1) |

[1077] To construct a synthetic GAS containing promoter element, which is used in the Biological Assays described in Examples 13-14, a PCR based strategy is employed to generate a GAS-SV40 promoter sequence. The 5′ primer contains four tandem copies of the GAS binding site found in the IRF1 promoter and previously demonstrated to bind STATs upon induction with a range of cytokines (Rothman et al., Immunity 1:457-468 (1994).), although other GAS or ISRE elements can be used instead. The 5′ primer also contains 18 bp of sequence complementary to the SV40 early promoter sequence and is flanked with an XhoI site. The sequence of the 5′ primer is:

(SEQ ID NO:3)

5′:GCGCCTCGAGATTTCCCCGAAATCTAGATTTCCCCGAAATGATTTCC
CCGAAATGATTTCCCCGAAATATCTGCCATCTCAATTAG:3′

[1078] The downstream primer is complementary to the SV40 promoter and is flanked with a Hind III site: 5′:GCGGCAAGCTTTTTGCAAAGCCTAGGC:3′ (SEQ ID NO:4) PCR amplification is performed using the SV40 promoter template present in the B-gal:promoter plasmid obtained from Clontech. The resulting PCR fragment is digested with XhoI/Hind III and subcloned into BLSK2-. (Stratagene.) Sequencing with forward and reverse primers confirms that the insert contains the following sequence:

| | |
|---|---|
| 5′:CTCGAGATTTCCCCGAAATCTAGATTTCCCCGAAATGATTTCCCCGA | (SEQ ID NO:5) |
| AATGATTTCCCCGAAATATCTGCCATCTCAATTAGTCAGCAACCATAGTCCCG | |
| CCCCTAACTCCGCCCATCCCGCCCCTAACTCCGCCCAGTTCCGCCCATTCTCCG | |
| CCCCATGGCTGACTAATTTTTTTTATTTATGCAGAGGCCGAGGCCGCCTCGGCC | |
| TCTGAGCTATTCCAGAAGTAGTGAGGAGGCTTTTTTGGAGGCCTAGGCTTTTG | |
| CAAAAAGCTT:3′ | |

[1079] With this GAS promoter element linked to the SV40 promoter, a GAS:SEAP2 reporter construct is next engineered. Here, the reporter molecule is a secreted alkaline phosphatase, or “SEAP.” Clearly, however, any reporter molecule can be instead of SEAP, in this or in any of the other Examples. Well known reporter molecules that can be used instead of SEAP include chloramphenicol acetyltransferase (CAT), luciferase, alkaline phosphatase, B-galactosidase, green fluorescent protein (GFP), or any protein detectable by an antibody.

[1080] The above sequence confirmed synthetic GAS-SV40 promoter element is subcloned into the pSEAP-Promoter vector obtained from Clontech using HindIII and XhoI, effectively replacing the SV40 promoter with the amplified GAS:SV40 promoter element, to create the GAS-SEAP vector. However, this vector does not contain a neomycin resistance gene, and therefore, is not preferred for mammalian expression systems.

[1081] Thus, in order to generate mammalian stable cell lines expressing the GAS-SEAP reporter, the GAS-SEAP cassette is removed from the GAS-SEAP vector using SalI and NotI, and inserted into a backbone vector containing the neomycin resistance gene, such as pGFP-1 (Clontech), using these restriction sites in the multiple cloning site, to create the GAS-SEAP/Neo vector. Once this vector is transfected into mammalian cells, this vector can then be used as a reporter molecule for GAS binding as described in Examples 13-14.

[1082] Other constructs can be made using the above description and replacing GAS with a different promoter sequence. For example, construction of reporter molecules containing NFK-B and EGR promoter sequences are described in Examples 15 and 16. However, many other promoters can be substituted using the protocols described in these Examples. For instance, SRE, IL-2, NFAT, or Osteocalcin promoters can be substituted, alone or in combination (e.g., GAS/NF-KB/EGR, GAS/NF-KB, 11-2/NFAT, or NF-KB/GAS). Similarly, other cell lines can be used to test reporter construct activity, such as HELA (epithelial), HUVEC (endothelial), Reh (B-cell), Saos-2 (osteoblast), HUVAC (aortic), or Cardiomyocyte.

### Example 13

### High-Throughput Screening Assay for T-Cell Activity

[1083] The following protocol is used to assess T-cell activity by identifying factors, and determining whether supernate containing a polypeptide of the invention proliferates and/or differentiates T-cells. T-cell activity is assessed using the GAS/SEAP/Neo construct produced in Example 12. Thus, factors that increase SEAP activity indicate the ability to activate the Jaks-STATS signal transduction pathway. The T-cell used in this assay is Jurkat T-cells (ATCC Accession No. TIB-152), although Molt-3 cells (ATCC Accession No. CRL-1552) and Molt-4 cells (ATCC Accession No. CRL-1582) cells can also be used.

[1084] Jurkat T-cells are lymphoblastic CD4+ Th1 helper cells. In order to generate stable cell lines, approximately 2 million Jurkat cells are transfected with the GAS-SEAP/neo vector using DMRIE-C (Life Technologies)(transfection procedure described below). The transfected cells are seeded to a density of approximately 20,000 cells per well and transfectants resistant to 1 mg/ml genticin selected. Resistant colonies are expanded and then tested for their response to increasing concentrations of interferon gamma. The dose response of a selected clone is demonstrated.

[1085] Specifically, the following protocol will yield sufficient cells for 75 wells containing 200 ul of cells. Thus, it is either scaled up, or performed in multiple to generate sufficient cells for multiple 96 well plates. Jurkat cells are maintained in RPMI+10% serum with 1% Pen-Strep. Combine 2.5 mls of OPTI-MEM (Life Technologies) with 10 ug of plasmid DNA in a T25 flask. Add 2.5 ml OPTI-MEM containing 50 ul of DMRIE-C and incubate at room temperature for 15-45 mins.

[1086] During the incubation period, count cell concentration, spin down the required number of cells (10⁷ per transfection), and resuspend in OPTI-MEM to a final concentration of 10⁷ cells/ml. Then add 1 ml of 1×10⁷ cells in OPTI-MEM to T25 flask and incubate at 37 degrees C. for 6 hrs. After the incubation, add 10 ml of RPMI+15% serum.

[1087] The Jurkat:GAS-SEAP stable reporter lines are maintained in RPMI+10% serum, 1 mg/ml Genticin, and 1% Pen-Strep. These cells are treated with supernatants containing polypeptides of the invention and/or induced polypeptides of the invention as produced by the protocol described in Example 11.

[1088] On the day of treatment with the supernatant, the cells should be washed and resuspended in fresh RPMI+10% serum to a density of 500,000 cells per ml. The exact number of cells required will depend on the number of supernatants being screened. For one 96 well plate, approximately 10 million cells (for 10 plates, 100 million cells) are required.

[1089] Transfer the cells to a triangular reservoir boat, in order to dispense the cells into a 96 well dish, using a 12 channel pipette. Using a 12 channel pipette, transfer 200 ul of cells into each well (therefore adding 100,000 cells per well).

[1090] After all the plates have been seeded, 50 ul of the supernatants are transferred directly from the 96 well plate containing the supernatants into each well using a 12 channel pipette. In addition, a dose of exogenous interferon gamma (0.1, 1.0, 10 ng) is added to wells H9, H10, and H11 to serve as additional positive controls for the assay.

[1091] The 96 well dishes containing Jurkat cells treated with supernatants are placed in an incubator for 48 hrs (note: this time is variable between 48-72 hrs). 35 ul samples from each well are then transferred to an opaque 96 well plate using a 12 channel pipette. The opaque plates should be covered (using sellophene covers) and stored at −20 degrees C. until SEAP assays are performed according to Example 17. The plates containing the remaining treated cells are placed at 4 degrees C. and serve as a source of material for repeating the assay on a specific well if desired.

[1092] As a positive control, 100 Unit/ml interferon gamma can be used which is known to activate Jurkat T cells. Over 30 fold induction is typically observed in the positive control wells.

[1093] The above protocol may be used in the generation of both transient, as well as, stable transfected cells, which would be apparent to those of skill in the art.

### Example 14

### High-Throughput Screening Assay Identifying Myeloid Activity

[1094] The following protocol is used to assess myeloid activity by determining whether polypeptides of the invention proliferates and/or differentiates myeloid cells. Myeloid cell activity is assessed using the GAS/SEAP/Neo construct produced in Example 12. Thus, factors that increase SEAP activity indicate the ability to activate the Jaks-STATS signal transduction pathway. The myeloid cell used in this assay is U937, a pre-monocyte cell line, although TF-1, HL60, or KG1 can be used.

[1095] To transiently transfect U937 cells with the GAS/SEAP/Neo construct produced in Example 12, a DEAE-Dextran method (Kharbanda et. al., 1994, Cell Growth & Differentiation, 5:259-265) is used. First, harvest 2×10e⁷ U937 cells and wash with PBS. The U937 cells are usually grown in RPMI 1640 medium containing 10% heat-inactivated fetal bovine serum (FBS) supplemented with 100 units/ml penicillin and 100 mg/ml streptomycin.

[1096] Next, suspend the cells in 1 ml of 20 mM Tris-HCl (pH 7.4) buffer containing 0.5 mg/ml DEAE-Dextran, 8 ug GAS-SEAP2 plasmid DNA, 140 mM NaCl, 5 mM KCl, 375 uM Na₂HPO₄.7H₂₀, 1 mM MgCl₂, and 675 uM CaCl₂. Incubate at 37 degrees C. for 45 min.

[1097] Wash the cells with RPMI 1640 medium containing 10% FBS and then resuspend in 10 ml complete medium and incubate at 37 degrees C. for 36 hr.

[1098] The GAS-SEAP/U937 stable cells are obtained by growing the cells in 400 ug/ml G418. The G418-free medium is used for routine growth but every one to two months, the cells should be re-grown in 400 ug/ml G418 for couple of passages.

[1099] These cells are tested by harvesting 1×10⁸ cells (this is enough for ten 96-well plates assay) and wash with PBS. Suspend the cells in 200 ml above described growth medium, with a final density of 5×10⁵ cells/ml. Plate 200 ul cells per well in the 96-well plate (or 1×10⁵ cells/well).

[1100] Add 50 ul of the supernatant prepared by the protocol described in Example 11. Incubate at 37 degrees C. for 48 to 72 hr. As a positive control, 100 Unit/ml interferon gamma can be used which is known to activate U937 cells. Over 30 fold induction is typically observed in the positive control wells. SEAP assay the supernatant according to the protocol described in Example 17.

### Example 15

### High-Throughput Screening Assay Identifying Neuronal Activity

[1101] When cells undergo differentiation and proliferation, a group of genes are activated through many different signal transduction pathways. One of these genes, EGR1 (early growth response gene 1), is induced in various tissues and cell types upon activation. The promoter of EGR1 is responsible for such induction. Using the EGR1 promoter linked to reporter molecules, activation of cells can be assessed.

[1102] Particularly, the following protocol is used to assess neuronal activity in PC12 cell lines. PC12 cells (rat phenochromocytoma cells) are known to proliferate and/or differentiate by activation with a number of mitogens, such as TPA (tetradecanoyl phorbol acetate), NGF (nerve growth factor), and EGF (epidermal growth factor). The EGR1 gene expression is activated during this treatment. Thus, by stably transfecting PC12 cells with a construct containing an EGR promoter linked to SEAP reporter, activation of PC12 cells can be assessed.

[1103] The EGR/SEAP reporter construct can be assembled by the following protocol. The EGR-1 promoter sequence (−633 to +1)(Sakamoto K et al., Oncogene 6:867-871 (1991)) can be PCR amplified from human genomic DNA using the following primers:

(SEQ ID NO:6)

5′ GCGCTCGAGGGATGACAGCGATAGAACCCCGG-3′

(SEQ ID NO:7)

5′ GCGAAGCTTCGCGACTCCCCGGATCCGCCTC-3′

[1104] Using the GAS:SEAP/Neo vector produced in Example 12, EGR1 amplified product can then be inserted into this vector. Linearize the GAS:SEAP/Neo vector using restriction enzymes XhoI/HindIII, removing the GAS/SV40 stuffer. Restrict the EGR1 amplified product with these same enzymes. Ligate the vector and the EGR1 promoter.

[1105] To prepare 96 well-plates for cell culture, two mls of a coating solution (1:30 dilution of collagen type I (Upstate Biotech Inc. Cat#08-115) in 30% ethanol (filter sterilized)) is added per one 10 cm plate or 50 ml per well of the 96-well plate, and allowed to air dry for 2 hr.

[1106] PC12 cells are routinely grown in RPMI-1640 medium (Bio Whittaker) containing 10% horse serum (JRH BIOSCIENCES, Cat. # 12449-78P), 5% heat-inactivated fetal bovine serum (FBS) supplemented with 100 units/ml penicillin and 100 ug/ml streptomycin on a precoated 10 cm tissue culture dish. One to four split is done every three to four days. Cells are removed from the plates by scraping and resuspended with pipetting up and down for more than 15 times.

[1107] Transfect the EGR/SEAP/Neo construct into PC12 using the Lipofectamine protocol described in Example 11. EGR-SEAP/PC12 stable cells are obtained by growing the cells in 300 ug/ml G418. The G418-free medium is used for routine growth but every one to two months, the cells should be re-grown in 300 ug/ml G418 for couple of passages.

[1108] To assay for neuronal activity, a 10 cm plate with cells around 70 to 80% confluent is screened by removing the old medium. Wash the cells once with PBS (Phosphate buffered saline). Then starve the cells in low serum medium (RPMI-1640 containing 1% horse serum and 0.5% FBS with antibiotics) overnight.

[1109] The next morning, remove the medium and wash the cells with PBS. Scrape off the cells from the plate, suspend the cells well in 2 ml low serum medium. Count the cell number and add more low serum medium to reach final cell density as 5×10⁵ cells/ml.

[1110] Add 200 ul of the cell suspension to each well of 96-well plate (equivalent to 1×10⁵ cells/well). Add 50 ul supernatant produced by Example 11, 37° C. for 48 to 72 hr. As a positive control, a growth factor known to activate PC12 cells through EGR can be used, such as 50 ng/ul of Neuronal Growth Factor (NGF). Over fifty-fold induction of SEAP is typically seen in the positive control wells. SEAP assay the supernatant according to Example 17.

### Example 16

### High-Throughput Screening Assay for T-Cell Activity

[1111] NF-KB (Nuclear Factor KB) is a transcription factor activated by a wide variety of agents including the inflammatory cytokines IL-1 and TNF, CD30 and CD40, lymphotoxin-alpha and lymphotoxin-beta, by exposure to LPS or thrombin, and by expression of certain viral gene products. As a transcription factor, NF-KB regulates the expression of genes involved in immune cell activation, control of apoptosis (NF-KB appears to shield cells from apoptosis), B and T-cell development, anti-viral and antimicrobial responses, and multiple stress responses.

[1112] In non-stimulated conditions, NF-KB is retained in the cytoplasm with I-KB (Inhibitor KB). However, upon stimulation, I-KB is phosphorylated and degraded, causing NF-KB to shuttle to the nucleus, thereby activating transcription of target genes. Target genes activated by NF-KB include IL-2, IL-6, GM-CSF, ICAM-1 and class 1 MHC.

[1113] Due to its central role and ability to respond to a range of stimuli, reporter constructs utilizing the NF-KB promoter element are used to screen the supernatants produced in Example 11. Activators or inhibitors of NF-KB would be useful in treating diseases. For example, inhibitors of NF-KB could be used to treat those diseases related to the acute or chronic activation of NF-KB, such as rheumatoid arthritis.

[1114] To construct a vector containing the NF-KB promoter element, a PCR based strategy is employed. The upstream primer contains four tandem copies of the NF-KB binding site (GGGGACTTTCCC) (SEQ ID NO:8), 18 bp of sequence complementary to the 5′ end of the SV40 early promoter sequence, and is flanked with an XhoI site:

(SEQ ID NO:9)

5′:GCGGCCTCGAGGGGACTTTCCCGGGGACTTTCCGGGGACTTTCCGGG
ACTTTCCATCCTGCCATCTCAATTAG:3′

[1115] The downstream primer is complementary to the 3′ end of the SV40 promoter and is flanked with a Hind III site:

| | |
|---|---|
| 5′:GCGGCAAGCTTTTTGCAAAGCCTAGGC:3′ | (SEQ ID NO:4) |

[1116] PCR amplification is performed using the SV40 promoter template present in the pB-gal:promoter plasmid obtained from Clontech. The resulting PCR fragment is digested with XhoI and Hind III and subcloned into BLSK2-. (Stratagene) Sequencing with the T7 and T3 primers confirms the insert contains the following sequence:

| | |
|---|---|
| 5′:CTCGAGGGGACTTTCCCGGGGACTTTCCGGGGACTTTCCGGGACTTT | (SEQ ID NO:10) |
| CCATCTGCCATCTCAATTAGTCAGCAACCATAGTCCCGCCCCTAACTCCGCCC | |
| ATCCCGCCCCTAACTCCGCCCAGTTCCGCCCATTCTCCGCCCCATGGCTGACTA | |
| ATTTTTTTTATTTATGCAGAGGCCGAGGCCGCCTCGGCCTCTGAGCTATTCCAG | |
| AAGTAGTGAGGAGGCTTTTTTGGAGGCCTAGGCTTTTGCAAAAAGCTT:3′ | |

[1117] Next, replace the SV40 minimal promoter element present in the pSEAP2-promoter plasmid (Clontech) with this NF-KB/SV40 fragment using XhoI and HindIII. However, this vector does not contain a neomycin resistance gene, and therefore, is not preferred for mammalian expression systems.

[1118] In order to generate stable mammalian cell lines, the NF-KB/SV40/SEAP cassette is removed from the above NF-KB/SEAP vector using restriction enzymes SalI and NotI, and inserted into a vector containing neomycin resistance. Particularly, the NF-KB/SV40/SEAP cassette was inserted into pGFP-1 (Clontech), replacing the GFP gene, after restricting pGFP-1 with SalI and NotI.

[1119] Once NF-KB/SV40/SEAP/Neo vector is created, stable Jurkat T-cells are created and maintained according to the protocol described in Example 13. Similarly, the method for assaying supernatants with these stable Jurkat T-cells is also described in Example 13. As a positive control, exogenous TNF alpha (0.1, 1, 10 ng) is added to wells H9, H10, and H11, with a 5-10 fold activation typically observed.

### Example 17

### Assay for SEAP Activity

[1120] As a reporter molecule for the assays described in Examples 13-16, SEAP activity is assayed using the Tropix Phospho-light Kit (Cat. BP-400) according to the following general procedure. The Tropix Phospho-light Kit supplies the Dilution, Assay, and Reaction Buffers used below.

[1121] Prime a dispenser with the 2.5× Dilution Buffer and dispense 15 ul of 2.5× dilution buffer into Optiplates containing 35 ul of a supernatant. Seal the plates with a plastic sealer and incubate at 65 degree C. for 30 min. Separate the Optiplates to avoid uneven heating.

[1122] Cool the samples to room temperature for 15 minutes. Empty the dispenser and prime with the Assay Buffer. Add 50 ml Assay Buffer and incubate at room temperature 5 min. Empty the dispenser and prime with the Reaction Buffer (see the table below). Add 50 ul Reaction Buffer and incubate at room temperature for 20 minutes. Since the intensity of the chemiluminescent signal is time dependent, and it takes about 10 minutes to read 5 plates on luminometer, one should treat 5 plates at each time and start the second set 10 minutes later.

[1123] Read the relative light unit in the luminometer. Set H12 as blank, and print the results. An increase in chemiluminescence indicates reporter activity.

Reaction Buffer Formulation:

| # of plates | Rxn buffer diluent (ml) | CSPD (ml) |
|---|---|---|
| 10 | 60 | 3 |
| 11 | 65 | 3.25 |
| 12 | 70 | 3.5 |
| 13 | 75 | 3.75 |
| 14 | 80 | 4 |
| 15 | 85 | 4.25 |
| 16 | 90 | 4.5 |
| 17 | 95 | 4.75 |
| 18 | 100 | 5 |
| 19 | 105 | 5.25 |
| 20 | 110 | 5.5 |
| 21 | 115 | 5.75 |
| 22 | 120 | 6 |
| 23 | 125 | 6.25 |
| 24 | 130 | 6.5 |
| 25 | 135 | 6.75 |
| 26 | 140 | 7 |
| 27 | 145 | 7.25 |
| 28 | 150 | 7.5 |
| 29 | 155 | 7.75 |
| 30 | 160 | 8 |
| 31 | 165 | 8.25 |
| 32 | 170 | 8.5 |
| 33 | 175 | 8.75 |
| 34 | 180 | 9 |
| 35 | 185 | 9.25 |
| 36 | 190 | 9.5 |
| 37 | 195 | 9.75 |
| 38 | 200 | 10 |
| 39 | 205 | 10.25 |
| 40 | 210 | 10.5 |
| 41 | 215 | 10.75 |
| 42 | 220 | 11 |
| 43 | 225 | 11.25 |
| 44 | 230 | 11.5 |
| 45 | 235 | 11.75 |
| 46 | 240 | 12 |
| 47 | 245 | 12.25 |
| 48 | 250 | 12.5 |
| 49 | 255 | 12.75 |
| 50 | 260 | 13 |

### Example 18

### High-Throughput Screening Assay Identifying Changes in SmalI Molecule Concentration and Membrane Permeability

[1124] Binding of a ligand to a receptor is known to alter intracellular levels of small molecules, such as calcium, potassium, sodium, and pH, as well as alter membrane potential. These alterations can be measured in an assay to identify supernatants which bind to receptors of a particular cell. Although the following protocol describes an assay for calcium, this protocol can easily be modified to detect changes in potassium, sodium, pH, membrane potential, or any other small molecule which is detectable by a fluorescent probe.

[1125] The following assay uses Fluorometric Imaging Plate Reader (“FLIPR”) to measure changes in fluorescent molecules (Molecular Probes) that bind small molecules. Clearly, any fluorescent molecule detecting a small molecule can be used instead of the calcium fluorescent molecule, fluo-4 (Molecular Probes, Inc.; catalog no. F-14202), used here.

[1126] For adherent cells, seed the cells at 10,000-20,000 cells/well in a Co-star black 96-well plate with clear bottom. The plate is incubated in a CO₂ incubator for 20 hours. The adherent cells are washed two times in Biotek washer with 200 ul of HBSS (Hank's Balanced Salt Solution) leaving 100 ul of buffer after the final wash.

[1127] A stock solution of 1 mg/ml fluo-4 is made in 10% pluronic acid DMSO. To load the cells with fluo-4, 50 ul of 12 ug/ml fluo-4 is added to each well. The plate is incubated at 37 degrees C. in a CO₂ incubator for 60 min. The plate is washed four times in the Biotek washer with HBSS leaving 100 ul of buffer.

[1128] For non-adherent cells, the cells are spun down from culture media. Cells are re-suspended to 2-5×10⁶ cells/ml with HBSS in a 50-ml conical tube. 4 ul of 1 mg/ml fluo-4 solution in 10% pluronic acid DMSO is added to each ml of cell suspension. The tube is then placed in a 37 degrees C. water bath for 30-60 min. The cells are washed twice with HBSS, resuspended to 1×10⁶ cells/ml, and dispensed into a microplate, 100 ul/well. The plate is centrifuged at 1000 rpm for 5 min. The plate is then washed once in Denley CellWash with 200 ul, followed by an aspiration step to 100 ul final volume.

[1129] For a non-cell based assay, each well contains a fluorescent molecule, such as fluo-4. The supernatant is added to the well, and a change in fluorescence is detected.

[1130] To measure the fluorescence of intracellular calcium, the FLIPR is set for the following parameters: (1) System gain is 300-800 mW; (2) Exposure time is 0.4 second; (3) Camera F/stop is F/2; (4) Excitation is 488 nm; (5) Emission is 530 nm; and (6) Sample addition is 50 ul. Increased emission at 530 nm indicates an extracellular signaling event which has resulted in an increase in the intracellular Ca⁺⁺ concentration.

### Example 19

### High-Throughput Screening Assay Identifying Tyrosine Kinase Activity

[1131] The Protein Tyrosine Kinases (PTK) represent a diverse group of transmembrane and cytoplasmic kinases. Within the Receptor Protein Tyrosine Kinase RPTK) group are receptors for a range of mitogenic and metabolic growth factors including the PDGF, FGF, EGF, NGF, HGF and Insulin receptor subfamilies. In addition there are a large family of RPTKs for which the corresponding ligand is unknown. Ligands for RPTKs include mainly secreted small proteins, but also membrane-bound and extracellular matrix proteins.

[1132] Activation of RPTK by ligands involves ligand-mediated receptor dimerization, resulting in transphosphorylation of the receptor subunits and activation of the cytoplasmic tyrosine kinases. The cytoplasmic tyrosine kinases include receptor associated tyrosine kinases of the src-family (e.g., src, yes, Ick, lyn, fyn) and non-receptor linked and cytosolic protein tyrosine kinases, such as the Jak family, members of which mediate signal transduction triggered by the cytokine superfamily of receptors (e.g., the Interleukins, Interferons, GM-CSF, and Leptin).

[1133] Because of the wide range of known factors capable of stimulating tyrosine kinase activity, the identification of novel human secreted proteins capable of activating tyrosine kinase signal transduction pathways are of interest. Therefore, the following protocol is designed to identify those novel human secreted proteins capable of activating the tyrosine kinase signal transduction pathways.

[1134] Seed target cells (e.g., primary keratinocytes) at a density of approximately 25,000 cells per well in a 96 well Loprodyne Silent Screen Plates purchased from Nalge Nunc (Naperville, Ill.). The plates are sterilized with two 30 minute rinses with 100% ethanol, rinsed with water and dried overnight. Some plates are coated for 2 hr with 100 ml of cell culture grade type I collagen (50 mg/ml), gelatin (2%) or polylysine (50 mg/ml), all of which can be purchased from Sigma Chemicals (St. Louis, Mo.) or 10% Matrigel purchased from Becton Dickinson (Bedford, Mass.), or calf serum, rinsed with PBS and stored at 4 degree C. Cell growth on these plates is assayed by seeding 5,000 cells/well in growth medium and indirect quantitation of cell number through use of alamarBlue as described by the manufacturer Alamar Biosciences, Inc. (Sacramento, Calif.) after 48 hr. Falcon plate covers #3071 from Becton Dickinson (Bedford, Mass.) are used to cover the Loprodyne Silent Screen Plates. Falcon Microtest III cell culture plates can also be used in some proliferation experiments.

[1135] To prepare extracts, A431 cells are seeded onto the nylon membranes of Loprodyne plates (20,000/200 ml/well) and cultured overnight in complete medium. Cells are quiesced by incubation in serum-free basal medium for 24 hr. After 5-20 minutes treatment with EGF (60 ng/ml) or 50 ul of the supernatant produced in Example 11, the medium was removed and 100 ml of extraction buffer ((20 mM HEPES pH 7.5, 0.15 M NaCl, 1% Triton X-100,0.1% SDS, 2 mM Na3VO4, 2 mM Na4P2O7 and a cocktail of protease inhibitors (# 1836170) obtained from Boeheringer Mannheim (Indianapolis, Ind.) is added to each well and the plate is shaken on a rotating shaker for 5 minutes at 4 degrees C. The plate is then placed in a vacuum transfer manifold and the extract filtered through the 0.45 mm membrane bottoms of each well using house vacuum. Extracts are collected in a 96-well catch/assay plate in the bottom of the vacuum manifold and immediately placed on ice. To obtain extracts clarified by centrifugation, the content of each well, after detergent solubilization for 5 minutes, is removed and centrifuged for 15 minutes at 4 degrees C. at 16,000×g.

[1136] Test the filtered extracts for levels of tyrosine kinase activity. Although many methods of detecting tyrosine kinase activity are known, one method is described here.

[1137] Generally, the tyrosine kinase activity of a supernatant is evaluated by determining its ability to phosphorylate a tyrosine residue on a specific substrate (a biotinylated peptide). Biotinylated peptides that can be used for this purpose include PSK1 (corresponding to amino acids 6-20 of the cell division kinase cdc2-p34) and PSK2 (corresponding to amino acids 1-17 of gastrin). Both peptides are substrates for a range of tyrosine kinases and are available from Boehringer Mannheim.

[1138] The tyrosine kinase reaction is set up by adding the following components in order. First, add 10 ul of 5 uM Biotinylated Peptide, then 10 ul ATP/Mg₂₊ (5 mM ATP/50 mM MgCl₂), then 10 ul of 5× Assay Buffer (40 mM imidazole hydrochloride, pH7.3, 40 mM beta-glycerophosphate, 1 mM EGTA, 10 mM MgCl₂, 5 mM MnCl₂, 0.5 mg/ml BSA), then 5 ul of Sodium Vanadate (1 mM), and then 5 ul of water. Mix the components gently and preincubate the reaction mix at 30 degrees C. for 2 min. Initial the reaction by adding 10 ul of the control enzyme or the filtered supernatant.

[1139] The tyrosine kinase assay reaction is then terminated by adding 10 ul of 120 mm EDTA and place the reactions on ice.

[1140] Tyrosine kinase activity is determined by transferring 50 ul aliquot of reaction mixture to a microtiter plate (MTP) module and incubating at 37 degrees C. for 20 min. This allows the streptavadin coated 96 well plate to associate with the biotinylated peptide. Wash the MTP module with 300 ul/well of PBS four times. Next add 75 ul of anti-phospotyrosine antibody conjugated to horse radish peroxidase (anti-P-Tyr-POD (0.5 u/ml)) to each well and incubate at 37 degrees C. for one hour. Wash the well as above.

[1141] Next add 100 ul of peroxidase substrate solution (Boehringer Mannheim) and incubate at room temperature for at least 5 mins (up to 30 min). Measure the absorbance of the sample at 405 nm by using ELISA reader. The level of bound peroxidase activity is quantitated using an ELISA reader and reflects the level of tyrosine kinase activity.

### Example 20

### High-Throughput Screening Assay Identifying Phosphorylation Activity

[1142] As a potential alternative and/or compliment to the assay of protein tyrosine kinase activity described in Example 19, an assay which detects activation (phosphorylation) of major intracellular signal transduction intermediates can also be used. For example, as described below one particular assay can detect tyrosine phosphorylation of the Erk-1 and Erk-2 kinases. However, phosphorylation of other molecules, such as Raf, JNK, p38 MAP, Map kinase kinase (MEK), MEK kinase, Src, Muscle specific kinase (MuSK), IRAK, Tec, and Janus, as well as any other phosphoserine, phosphotyrosine, or phosphothreonine molecule, can be detected by substituting these molecules for Erk-1 or Erk-2 in the following assay.

[1143] Specifically, assay plates are made by coating the wells of a 96-well ELISA plate with 0.1 ml of protein G (lug/ml) for 2 hr at room temp, (RT). The plates are then rinsed with PBS and blocked with 3% BSA/PBS for 1 hr at RT. The protein G plates are then treated with 2 commercial monoclonal antibodies (100 ng/well) against Erk-1 and Erk-2 (1 hr at RT) (Santa Cruz Biotechnology). (To detect other molecules, this step can easily be modified by substituting a monoclonal antibody detecting any of the above described molecules.) After 3-5 rinses with PBS, the plates are stored at 4 degrees C. until use.

[1144] A431 cells are seeded at 20,000/well in a 96-well Loprodyne filter plate and cultured overnight in growth medium. The cells are then starved for 48 hr in basal medium (DMEM) and then treated with EGF (6 ng/well) or 50 ul of the supernatants obtained in Example 11 for 5-20 minutes. The cells are then solubilized and extracts filtered directly into the assay plate.

[1145] After incubation with the extract for 1 hr at RT, the wells are again rinsed. As a positive control, a commercial preparation of MAP kinase (10 ng/well) is used in place of A431 extract. Plates are then treated with a commercial polyclonal (rabbit) antibody (lug/ml) which specifically recognizes the phosphorylated epitope of the Erk-1 and Erk-2 kinases (1 hr at RT). This antibody is biotinylated by standard procedures. The bound polyclonal antibody is then quantitated by successive incubations with Europium-streptavidin and Europium fluorescence enhancing reagent in the Wallac DELFIA instrument (time-resolved fluorescence). An increased fluorescent signal over background indicates a phosphorylation.

### Example 21

### Method of Determining Alterations in a Gene Corresponding to a Polynucleotide

[1146] RNA isolated from entire families or individual patients presenting with a phenotype of interest (such as a disease) is be isolated. cDNA is then generated from these RNA samples using protocols known in the art. (See, Sambrook.) The cDNA is then used as a template for PCR, employing primers surrounding regions of interest in SEQ ID NO:X. Suggested PCR conditions consist of 35 cycles at 95 degrees C. for 30 seconds; 60-120 seconds at 52-58 degrees C.; and 60-120 seconds at 70 degrees C., using buffer solutions described in Sidransky et al., Science 252:706 (1991).

[1147] PCR products are then sequenced using primers labeled at their 5′ end with T4 polynucleotide kinase, employing SequiTherm Polymerase. (Epicentre Technologies). The intron-exon borders of selected exons is also determined and genomic PCR products analyzed to confirm the results. PCR products harboring suspected mutations is then cloned and sequenced to validate the results of the direct sequencing.

[1148] PCR products is cloned into T-tailed vectors as described in Holton et al., Nucleic Acids Research, 19:1156 (1991) and sequenced with T7 polymerase (United States Biochemical). Affected individuals are identified by mutations not present in unaffected individuals.

[1149] Genomic rearrangements are also observed as a method of determining alterations in a gene corresponding to a polynucleotide. Genomic clones isolated according to Example 2 are nick-translated with digoxigenindeoxy-uridine 5′-triphosphate (Boehringer Manheim), and FISH performed as described in Johnson et al., Methods Cell Biol. 35:73-99 (1991). Hybridization with the labeled probe is carried out using a vast excess of human cot-1 DNA for specific hybridization to the corresponding genomic locus.

[1150] Chromosomes are counterstained with 4,6-diamino-2-phenylidole and propidium iodide, producing a combination of C- and R-bands. Aligned images for precise mapping are obtained using a triple-band filter set (Chroma Technology, Brattleboro, Vt.) in combination with a cooled charge-coupled device camera (Photometrics, Tucson, Ariz.) and variable excitation wavelength filters. (Johnson et al., Genet. Anal. Tech. Appl., 8:75 (1991).) Image collection, analysis and chromosomal fractional length measurements are performed using the ISee Graphical Program System. (Inovision Corporation, Durham, N.C.) Chromosome alterations of the genomic region hybridized by the probe are identified as insertions, deletions, and translocations. These alterations are used as a diagnostic marker for an associated disease.

### Example 22

### Method of Detecting Abnormal Levels of a Polypeptide in a Biological Sample

[1151] A polypeptide of the present invention can be detected in a biological sample, and if an increased or decreased level of the polypeptide is detected, this polypeptide is a marker for a particular phenotype. Methods of detection are numerous, and thus, it is understood that one skilled in the art can modify the following assay to fit their particular needs.

[1152] For example, antibody-sandwich ELISAs are used to detect polypeptides in a sample, preferably a biological sample. Wells of a microtiter plate are coated with specific antibodies, at a final concentration of 0.2 to 10 ug/ml. The antibodies are either monoclonal or polyclonal and are produced by the method described in Example 10. The wells are blocked so that non-specific binding of the polypeptide to the well is reduced.

[1153] The coated wells are then incubated for >2 hours at RT with a sample containing the polypeptide. Preferably, serial dilutions of the sample should be used to validate results. The plates are then washed three times with deionized or distilled water to remove unbounded polypeptide.

[1154] Next, 50 ul of specific antibody-alkaline phosphatase conjugate, at a concentration of 25-400 ng, is added and incubated for 2 hours at room temperature. The plates are again washed three times with deionized or distilled water to remove unbounded conjugate.

[1155] Add 75 ul of 4-methylumbelliferyl phosphate (MUP) or p-nitrophenyl phosphate (NPP) substrate solution to each well and incubate 1 hour at room temperature. Measure the reaction by a microtiter plate reader. Prepare a standard curve, using serial dilutions of a control sample, and plot polypeptide concentration on the X-axis (log scale) and fluorescence or absorbance of the Y-axis (linear scale). Interpolate the concentration of the polypeptide in the sample using the standard curve.

### Example 23

### Formulation

[1156] The invention also provides methods of treatment and/or prevention of diseases or disorders (such as, for example, any one or more of the diseases or disorders disclosed herein) by administration to a subject of an effective amount of a Therapeutic. By therapeutic is meant polynucleotides or polypeptides of the invention (including fragments and variants), agonists or antagonists thereof, and/or antibodies thereto, in combination with a pharmaceutically acceptable carrier type (e.g., a sterile carrier).

[1157] The Therapeutic will be formulated and dosed in a fashion consistent with good medical practice, taking into account the clinical condition of the individual patient (especially the side effects of treatment with the Therapeutic alone), the site of delivery, the method of administration, the scheduling of administration, and other factors known to practitioners. The “effective amount” for purposes herein is thus determined by such considerations.

[1158] As a general proposition, the total pharmaceutically effective amount of the Therapeutic administered parenterally per dose will be in the range of about lug/kg/day to 10 mg/kg/day of patient body weight, although, as noted above, this will be subject to therapeutic discretion. More preferably, this dose is at least 0.01 mg/kg/day, and most preferably for humans between about 0.01 and 1 mg/kg/day for the hormone. If given continuously, the Therapeutic is typically administered at a dose rate of about 1 ug/kg/hour to about 50 ug/kg/hour, either by 1-4 injections per day or by continuous subcutaneous infusions, for example, using a mini-pump. An intravenous bag solution may also be employed. The length of treatment needed to observe changes and the interval following treatment for responses to occur appears to vary depending on the desired effect.

[1159] Therapeutics can be are administered orally, rectally, parenterally, intracistemally, intravaginally, intraperitoneally, topically (as by powders, ointments, gels, drops or transdermal patch), bucally, or as an oral or nasal spray. “Pharmaceutically acceptable carrier” refers to a non-toxic solid, semisolid or liquid filler, diluent, encapsulating material or formulation auxiliary of any. The term “parenteral” as used herein refers to modes of administration which include intravenous, intramuscular, intraperitoneal, intrastemal, subcutaneous and intraarticular injection and infusion.

[1160] Therapeutics of the invention are also suitably administered by sustained-release systems. Suitable examples of sustained-release Therapeutics are administered orally, rectally, parenterally, intracistemally, intravaginally, intraperitoneally, topically (as by powders, ointments, gels, drops or transdermal patch), bucally, or as an oral or nasal spray. “Pharmaceutically acceptable carrier” refers to a non-toxic solid, semisolid or liquid filler, diluent, encapsulating material or formulation auxiliary of any type. The term “parenteral” as used herein refers to modes of administration which include intravenous, intramuscular, intraperitoneal, intrastemal, subcutaneous and intraarticular injection and infusion.

[1161] Therapeutics of the invention are also suitably administered by sustained-release systems. Suitable examples of sustained-release Therapeutics include suitable polymeric materials (such as, for example, semi-permeable polymer matrices in the form of shaped articles, e.g., films, or mirocapsules), suitable hydrophobic materials (for example as an emulsion in an acceptable oil) or ion exchange resins, and sparingly soluble derivatives (such as, for example, a sparingly soluble salt).

[1162] Sustained-release matrices include polylactides (U.S. Pat. No. 3,773,919, EP 58,481), copolymers of L-glutamic acid and gamma-ethyl-L-glutamate (Sidman et al., Biopolymers 22:547-556 (1983)), poly (2-hydroxyethyl methacrylate) (Langer et al., J. Biomed. Mater. Res. 15:167-277 (1981), and Langer, Chem. Tech. 12:98-105 (1982)), ethylene vinyl acetate (Langer et al., Id.) or poly-D-(−)-3-hydroxybutyric acid (EP 133,988).

[1163] Sustained-release Therapeutics also include liposomally entrapped Therapeutics of the invention (see generally, Langer, Science 249:1527-1533 (1990); Treat et al., in Liposomes in the Therapy of Infectious Disease and Cancer, Lopez-Berestein and Fidler (eds.), Liss, New York, pp. 317-327 and 353-365 (1989)). Liposomes containing the Therapeutic are prepared by methods known per se: DE 3,218,121; Epstein et al., Proc. Natl. Acad. Sci. (USA) 82:3688-3692 (1985); Hwang et al., Proc. Natl. Acad. Sci. (USA) 77:4030-4034 (1980); EP 52,322; EP 36,676; EP 88,046; EP 143,949; EP 142,641; Japanese Pat. Appl. 83-118008; U.S. Pat. Nos. 4,485,045 and 4,544,545; and EP 102,324. Ordinarily, the liposomes are of the small (about 200-800 Angstroms) unilamellar type in which the lipid content is greater than about 30 mol. percent cholesterol, the selected proportion being adjusted for the optimal Therapeutic.

[1164] In yet an additional embodiment, the Therapeutics of the invention are delivered by way of a pump (see Langer, supra; Sefton, CRC Crit. Ref. Biomed. Eng. 14:201 (1987); Buchwald et al., Surgery 88:507 (1980); Saudek et al., N. Engl. J. Med. 321:574 (1989)).

[1165] Other controlled release systems are discussed in the review by Langer (Science 249:1527-1533 (1990)).

[1166] For parenteral administration, in one embodiment, the Therapeutic is formulated generally by mixing it at the desired degree of purity, in a unit dosage injectable form (solution, suspension, or emulsion), with a pharmaceutically acceptable carrier, i.e., one that is non-toxic to recipients at the dosages and concentrations employed and is compatible with other ingredients of the formulation. For example, the formulation preferably does not include oxidizing agents and other compounds that are known to be deleterious to the Therapeutic.

[1167] Generally, the formulations are prepared by contacting the Therapeutic uniformly and intimately with liquid carriers or finely divided solid carriers or both. Then, if necessary, the product is shaped into the desired formulation. Preferably the carrier is a parenteral carrier, more preferably a solution that is isotonic with the blood of the recipient. Examples of such carrier vehicles include water, saline, Ringer's solution, and dextrose solution. Non-aqueous vehicles such as fixed oils and ethyl oleate are also useful herein, as well as liposomes.

[1168] The carrier suitably contains minor amounts of additives such as substances that enhance isotonicity and chemical stability. Such materials are non-toxic to recipients at the dosages and concentrations employed, and include buffers such as phosphate, citrate, succinate, acetic acid, and other organic acids or their salts; antioxidants such as ascorbic acid; low molecular weight (less than about ten residues) polypeptides, e.g., polyarginine or tripeptides; proteins, such as serum albumin, gelatin, or immunoglobulins; hydrophilic polymers such as polyvinylpyrrolidone; amino acids, such as glycine, glutamic acid, aspartic acid, or arginine; monosaccharides, disaccharides, and other carbohydrates including cellulose or its derivatives, glucose, manose, or dextrins; chelating agents such as EDTA; sugar alcohols such as mannitol or sorbitol; counterions such as sodium; and/or nonionic surfactants such as polysorbates, poloxamers, or PEG.

[1169] The Therapeutic is typically formulated in such vehicles at a concentration of about 0.1 mg/ml to 100 mg/ml, preferably 1-10 mg/ml, at a pH of about 3 to 8. It will be understood that the use of certain of the foregoing excipients, carriers, or stabilizers will result in the formation of polypeptide salts.

[1170] Any pharmaceutical used for therapeutic administration can be sterile. Sterility is readily accomplished by filtration through sterile filtration membranes (e.g., 0.2 micron membranes). Therapeutics generally are placed into a container having a sterile access port, for example, an intravenous solution bag or vial having a stopper pierceable by a hypodermic injection needle.

[1171] Therapeutics ordinarily will be stored in unit or multi-dose containers, for example, sealed ampoules or vials, as an aqueous solution or as a lyophilized formulation for reconstitution. As an example of a lyophilized formulation, 10-ml vials are filled with 5 ml of sterile-filtered 1% (w/v) aqueous Therapeutic solution, and the resulting mixture is lyophilized. The infusion solution is prepared by reconstituting the lyophilized Therapeutic using bacteriostatic Water-for-Injection.

[1172] The invention also provides a pharmaceutical pack or kit comprising one or more containers filled with one or more of the ingredients of the Therapeutics of the invention. Associated with such container(s) can be a notice in the form prescribed by a governmental agency regulating the manufacture, use or sale of pharmaceuticals or biological products, which notice reflects approval by the agency of manufacture, use or sale for human administration. In addition, the Therapeutics may be employed in conjunction with other therapeutic compounds.

[1173] The Therapeutics of the invention may be administered alone or in combination with adjuvants. Adjuvants that may be administered with the Therapeutics of the invention include, but are not limited to, alum, alum plus deoxycholate (ImmunoAg), MTP-PE (Biocine Corp.), QS21 (Genentech, Inc.), BCG (e.g., THERACYS®), MPL and nonviable prepartions of Corynebacterium parvum. In a specific embodiment, Therapeutics of the invention are administered in combination with alum. In another specific embodiment, Therapeutics of the invention are administered in combination with QS-21. Further adjuvants that may be administered with the Therapeutics of the invention include, but are not limited to, Monophosphoryl lipid immunomodulator, AdjuVax 100a, QS-21, QS-18, CRL1005, Aluminum salts, MF-59, and Virosomal adjuvant technology. Vaccines that may be administered with the Therapeutics of the invention include, but are not limited to, vaccines directed toward protection against MMR (measles, mumps, rubella), polio, varicella, tetanus/diptheria, hepatitis A, hepatitis B, haemophilus influenzae B, whooping cough, pneumonia, influenza, Lyme's Disease, rotavirus, cholera, yellow fever, Japanese encephalitis, poliomyelitis, rabies, typhoid fever, and pertussis. Combinations may be administered either concomitantly, e.g., as an admixture, separately but simultaneously or concurrently; or sequentially. This includes presentations in which the combined agents are administered together as a therapeutic mixture, and also procedures in which the combined agents are administered separately but simultaneously, e.g., as through separate intravenous lines into the same individual. Administration “in combination” further includes the separate administration of one of the compounds or agents given first, followed by the second.

[1174] The Therapeutics of the invention may be administered alone or in combination with other therapeutic agents. Therapeutic agents that may be administered in combination with the Therapeutics of the invention, include but not limited to, chemotherapeutic agents, antibiotics, steroidal and non-steroidal anti-inflammatories, conventional immunotherapeutic agents, and/or therapeutic treatments described below. Combinations may be administered either concomitantly, e.g., as an admixture, separately but simultaneously or concurrently; or sequentially. This includes presentations in which the combined agents are administered together as a therapeutic mixture, and also procedures in which the combined agents are administered separately but simultaneously, e.g., as through separate intravenous lines into the same individual. Administration “in combination” further includes the separate administration of one of the compounds or agents given first, followed by the second.

[1175] In certain embodiments, Therapeutics of the invention are administered in combination with antiretroviral agents, nucleoside/nucleotide reverse transcriptase inhibitors (NRTIs), non-nucleoside reverse transcriptase inhibitors (NNRTIs), and/or protease inhibitors (PIs). NRTIs that may be administered in combination with the Therapeutics of the invention, include, but are not limited to, RETROVIR™ (zidovudine/AZT), VIDEX™ (didanosine/ddI), HIVID™ (zalcitabine/ddC), ZERIT™ (stavudine/d4T), EPIVIR™ (lamivudine/3TC), and COMBIVIR™ (zidovudine/lamivudine). NNRTIs that may be administered in combination with the Therapeutics of the invention, include, but are not limited to, VIRAMUNE™ (nevirapine), RESCRIPTOR™ (delavirdine), and SUSTIVA™ (efavirenz). Protease inhibitors that may be administered in combination with the Therapeutics of the invention, include, but are not limited to, CRIXIVAN™ (indinavir), NORVIR™ (ritonavir), INVIRASE™ (saquinavir), and VIRACEPT™ (nelfinavir). In a specific embodiment, antiretroviral agents, nucleoside reverse transcriptase inhibitors, non-nucleoside reverse transcriptase inhibitors, and/or protease inhibitors may be used in any combination with Therapeutics of the invention to treat AIDS and/or to prevent or treat HIV infection.

[1176] Additional NRTIs include LODENOSINE™ (F-ddA; an acid-stable adenosine NRTI; Triangle/Abbott; COVIRACIL™ (emtricitabine/FTC; structurally related to lamivudine (3TC) but with 3- to 10-fold greater activity in vitro; Triangle/Abbott); dOTC (BCH-10652, also structurally related to lamivudine but retains activity against a substantial proportion of lamivudine-resistant isolates; Biochem Pharma); Adefovir (refused approval for anti-HIV therapy by FDA; Gilead Sciences); PREVEON® (Adefovir Dipivoxil, the active prodrug of adefovir; its active form is PMEA-pp); TENOFOVIR™ (bis-POC PMPA, a PMPA prodrug; Gilead); DAPD/DXG (active metabolite of DAPD; Triangle/Abbott); D-D4FC (related to 3TC, with activity against AZT/3TC-resistant virus); GW420867X (Glaxo Wellcome); ZIAGEN™ (abacavir/159U89; Glaxo Wellcome Inc.); CS-87 (3′azido-2′,3′-dideoxyuridine; WO 99/66936); and S-acyl-2-thioethyl (SATE)-bearing prodrug forms of β-L-FD4C and β-L-FddC (WO 98/17281).

[1177] Additional NNRTIs include COACTINON™ (Emivirine/MKC-442, potent NNRTI of the HEPT class; Triangle/Abbott); CAPRAVIRINE™ (AG-1549/S-1153, a next generation NNRTI with activity against viruses containing the K103N mutation; Agouron); PNU-142721 (has 20- to 50-fold greater activity than its predecessor delavirdine and is active against K103N mutants; Pharmacia & Upjohn); DPC-961 and DPC-963 (second-generation derivatives of efavirenz, designed to be active against viruses with the K103N mutation; DuPont); GW-420867× (has 25-fold greater activity than HBY097 and is active against K103N mutants; Glaxo Wellcome); CALANOLIDE A (naturally occurring agent from the latex tree; active against viruses containing either or both the Y181C and K103N mutations); and Propolis (WO 99/49830).

[1178] Additional protease inhibitors include LOPINAVIR™ (ABT378/r; Abbott Laboratories); BMS-232632 (an azapeptide; Bristol-Myres Squibb); TIPRANAVIR™ (PNU-140690, a non-peptic dihydropyrone; Pharmacia & Upjohn); PD-178390 (a nonpeptidic dihydropyrone; Parke-Davis); BMS 232632 (an azapeptide; Bristol-Myers Squibb); L-756, 423 (an indinavir analog; Merck); DMP-450 (a cyclic urea compound; Avid & DuPont); AG-1776 (a peptidomimetic with in vitro activity against protease inhibitor-resistant viruses; Agouron); VX-175/GW-433908 (phosphate prodrug of amprenavir; Vertex & Glaxo Welcome); CGP61755 (Ciba); and AGENERASE™ (amprenavir; Glaxo Wellcome Inc.).

[1179] Additional antiretroviral agents include fusion inhibitors/gp41 binders. Fusion inhibitors/gp41 binders include T-20 (a peptide from residues 643-678 of the HIV gp41 transmembrane protein ectodomain which binds to gp41 in its resting state and prevents transformation to the fusogenic state; Trimeris) and T-1249 (a second-generation fusion inhibitor; Trimeris).

[1180] Additional antiretroviral agents include fusion inhibitors/chemokine receptor antagonists. Fusion inhibitors/chemokine receptor antagonists include CXCR4 antagonists such as AMD 3100 (a bicyclam), SDF-1 and its analogs, and ALX40-4C (a cationic peptide), T22 (an 18 amino acid peptide; Trimeris) and the T22 analogs T134 and T140; CCR5 antagonists such as RANTES (9-68), AOP-RANTES, NNY-RANTES, and TAK-779; and CCR5/CXCR4 antagonists such as NSC 651016 (a distamycin analog). Also included are CCR2B, CCR3, and CCR6 antagonists. Chemokine recpetor agonists such as RANTES, SDF-1, MIP-1α, MIP-1β, etc., may also inhibit fusion.

[1181] Additional antiretroviral agents include integrase inhibitors. Integrase inhibitors include dicaffeoylquinic (DFQA) acids; L-chicoric acid (a dicaffeoyltartaric (DCTA) acid); quinalizarin (QLC) and related anthraquinones; ZINTEVIR™ (AR 177, an oligonucleotide that probably acts at cell surface rather than being a true integrase inhibitor; Arondex); and naphthols such as those disclosed in WO 98/50347.

[1182] Additional antiretroviral agents include hydroxyurea-like compunds such as BCX-34 (a purine nucleoside phosphorylase inhibitor; Biocryst); ribonucleotide reductase inhibitors such as DIDOX™ (Molecules for Health); inosine monophosphate dehydrogenase (IMPDH) inhibitors sucha as VX-497 (Vertex); and mycopholic acids such as CellCept (mycophenolate mofetil; Roche).

[1183] Additional antiretroviral agents include inhibitors of viral integrase, inhibitors of viral genome nuclear translocation such as arylene bis(methylketone) compounds; inhibitors of HIV entry such as AOP-RANTES, NNY-RANTES, RANTES-IgG fusion protein, soluble complexes of RANTES and glycosaminoglycans (GAG), and AMD-3100; nucleocapsid zinc finger inhibitors such as dithiane compounds; targets of HIV Tat and Rev; and pharmacoenhancers such as ABT-378.

[1184] Other antiretroviral therapies and adjunct therapies include cytokines and lymphokines such as MIP-1α, MIP-1β, SDF-1α, IL-2, PROLEUKIN™ (aldesleukin/L2-7001; Chiron), IL-4, IL-10, IL-12, and IL-13; interferons such as IFN-a2a; antagonists of TNFs, NFκB, GM-CSF, M-CSF, and IL-10; agents that modulate immune activation such as cyclosporin and prednisone; vaccines such as Remune™ (HIV Immunogen), APL 400-003 (Apollon), recombinant gp120 and fragments, bivalent (B/E) recombinant envelope glycoprotein, rgp120CM235, MN rgp120, SF-2 rgp120, gp120/soluble CD4 complex, Delta JR-FL protein, branched synthetic peptide derived from discontinuous gp120 C3/C4 domain, fusion-competent immunogens, and Gag, Pol, Nef, and Tat vaccines; gene-based therapies such as genetic suppressor elements (GSEs; WO 98/54366), and intrakines (genetically modified CC chemokines targetted to the ER to block surface expression of newly synthesized CCR5 (Yang et al., PNAS 94:11567-72 (1997); Chen et al., Nat. Med. 3:1110-16 (1997)); antibodies such as the anti-CXCR4 antibody 12G5, the anti-CCR5 antibodies 2D7, 5C7, PA8, PA9, PA10, PA11, PA12, and PA14, the anti-CD4 antibodies Q4120 and RPA-T4, the anti-CCR3 antibody 7B11, the anti-gp120 antibodies 17b, 48d, 447-52D, 257-D, 268-D and 50.1, anti-Tat antibodies, anti-TNF-α antibodies, and monoclonal antibody 33A; aryl hydrocarbon (AH) receptor agonists and antagonists such as TCDD, 3,3′,4,4′,5-pentachlorobiphenyl, 3,3′,4,4′-tetrachlorobiphenyl, and α-naphthoflavone (WO 98/30213); and antioxidants such as γ-L-glutamyl-L-cysteine ethyl ester (γ-GCE; WO 99/56764).

[1185] In a further embodiment, the Therapeutics of the invention are administered in combination with an antiviral agent. Antiviral agents that may be administered with the Therapeutics of the invention include, but are not limited to, acyclovir, ribavirin, amantadine, and remantidine.

[1186] In other embodiments, Therapeutics of the invention may be administered in combination with anti-opportunistic infection agents. Anti-opportunistic agents that may be administered in combination with the Therapeutics of the invention, include, but are not limited to, TRIMETHOPRIM-SULFAMETHOXAZOLE™, DAPSONE™, PENTAMIDINE™, ATOVAQUONE™, ISONIAZID™, RIFAMPIN™, PYRAZINAMIDE™, ETHAMBUTOL™, RIFABUTIN™, CLARITHROMYCIN™, AZITHROMYCIN™, GANCICLOVIR™, FOSCARNET™, CIDOFOVIR™, FLUCONAZOLE™, ITRACONAZOLE™, KETOCONAZOLE™, ACYCLOVIR™, FAMCICOLVIR™, PYRIMETHAMINE™, LEUCOVORIN™, NEUPOGEN™ (filgrastim/G-CSF), and LEUKINE™ (sargramostim/GM-CSF). In a specific embodiment, Therapeutics of the invention are used in any combination with TRIMETHOPRIM-SULFAMETHOXAZOLE™, DAPSONE™, PENTAMIDINE™, and/or ATOVAQUONE™ to prophylactically treat or prevent an opportunistic Pneumocystis carinii pneumonia infection. In another specific embodiment, Therapeutics of the invention are used in any combination with ISONLAZID™, RIFAMPI™, PYRAZINAMIDE™, and/or ETHAMBUTOL™ to prophylactically treat or prevent an opportunistic Mycobacterium avium complex infection. In another specific embodiment, Therapeutics of the invention are used in any combination with RIFABUTIN™, CLARITHROMYCIN™, and/or AZITHROMYCIN™ to prophylactically treat or prevent an opportunistic Mycobacterium tuberculosis infection. In another specific embodiment, Therapeutics of the invention are used in any combination with GANCICLOVIR™, FOSCARNET™, and/or CIDOFOVIR™ to prophylactically treat or prevent an opportunistic cytomegalovirus infection. In another specific embodiment, Therapeutics of the invention are used in any combination with FLUCONAZOLE™, ITRACONAZOLE™, and/or KETOCONAZOLE™ to prophylactically treat or prevent an opportunistic fungal infection. In another specific embodiment, Therapeutics of the invention are used in any combination with ACYCLOVIR™ and/or FAMCICOLVIR™ to prophylactically treat or prevent an opportunistic herpes simplex virus type I and/or type II infection. In another specific embodiment, Therapeutics of the invention are used in any combination with PYRIMETHAMINE™ and/or LEUCOVORIN™ to prophylactically treat or prevent an opportunistic Toxoplasma gondii infection. In another specific embodiment, Therapeutics of the invention are used in any combination with LEUCOVORIN™ and/or NEUPOGEN™ to prophylactically treat or prevent an opportunistic bacterial infection.

[1187] In a further embodiment, the Therapeutics of the invention are administered in combination with an antibiotic agent. Antibiotic agents that may be administered with the Therapeutics of the invention include, but are not limited to, amoxicillin, beta-lactamases, aminoglycosides, beta-lactam (glycopeptide), beta-lactamases, Clindamycin, chloramphenicol, cephalosporins, ciprofloxacin, erythromycin, fluoroquinolones, macrolides, metronidazole, penicillins, quinolones, rapamycin, rifampin, streptomycin, sulfonamide, tetracyclines, trimethoprim, trimethoprim-sulfamethoxazole, and vancomycin.

[1188] In other embodiments, Therapeutics of the invention are administered in combination with immunosuppressive agents. Immunosuppressive agents that may be administered in combination with the Therapeutics of the invention include, but are not limited to, steroids, cyclosporine, cyclosporine analogs, cyclophosphamide methylprednisone, prednisone, azathioprine, FK-506, 15-deoxyspergualin, and other immunosuppressive agents that act by suppressing the function of responding T cells. Other immunosuppressive agents that may be administered in combination with the Therapeutics of the invention include, but are not limited to, prednisolone, methotrexate, thalidomide, methoxsalen, rapamycin, leflunomide, mizoribine (BREDNIN™), brequinar, deoxyspergualin, and azaspirane (SKF 105685), ORTHOCLONE OKT® 3 (muromonab-CD3), SANDIMMUNE™, NEORAL™, SANGDYA™ (cyclosporine), PROGRAF® (FK506, tacrolimus), CELLCEPT® (mycophenolate motefil, of which the active metabolite is mycophenolic acid), IMURAN™ (azathioprine), glucocorticosteroids, adrenocortical steroids such as DELTASONE™ (prednisone) and HYDELTRASOL™ (prednisolone), FOLEX™ and MEXATE™ (methotrxate), OXSORALEN-ULTRA™ (methoxsalen) and RAPAMUNE™ (sirolimus). In a specific embodiment, immunosuppressants may be used to prevent rejection of organ or bone marrow transplantation.

[1189] In an additional embodiment, Therapeutics of the invention are administered alone or in combination with one or more intravenous immune globulin preparations. Intravenous immune globulin preparations that may be administered with the Therapeutics of the invention include, but not limited to, GAMMAR™, IVEEGAM™, SANDOGLOBULIN™, GAMMAGARD S/D™, ATGAM™ (antithymocyte glubulin), and GAMIMUNE™. In a specific embodiment, Therapeutics of the invention are administered in combination with intravenous immune globulin preparations in transplantation therapy (e.g., bone marrow transplant).

[1190] In certain embodiments, the Therapeutics of the invention are administered alone or in combination with an anti-inflammatory agent. Anti-inflammatory agents that may be administered with the Therapeutics of the invention include, but are not limited to, corticosteroids (e.g. betamethasone, budesonide, cortisone, dexamethasone, hydrocortisone, methylprednisolone, prednisolone, prednisone, and triamcinolone), nonsteroidal anti-inflammatory drugs (e.g., diclofenac, diflunisal, etodolac, fenoprofen, floctafenine, flurbiprofen, ibuprofen, indomethacin, ketoprofen, meclofenamate, mefenamic acid, meloxicam, nabumetone, naproxen, oxaprozin, phenylbutazone, piroxicam, sulindac, tenoxicam, tiaprofenic acid, and tolmetin.), as well as antihistamines, aminoarylcarboxylic acid derivatives, arylacetic acid derivatives, arylbutyric acid derivatives, arylcarboxylic acids, arylpropionic acid derivatives, pyrazoles, pyrazolones, salicylic acid derivatives, thiazinecarboxamides, e-acetamidocaproic acid, S-adenosylmethionine, 3-amino-4-hydroxybutyric acid, amixetrine, bendazac, benzydamine, bucolome, difenpiramide, ditazol, emorfazone, guaiazulene, nabumetone, nimesulide, orgotein, oxaceprol, paranyline, perisoxal, pifoxime, proquazone, proxazole, and tenidap.

[1191] In an additional embodiment, the compositions of the invention are administered alone or in combination with an anti-angiogenic agent. Anti-angiogenic agents that may be administered with the compositions of the invention include, but are not limited to, Angiostatin (Entremed, Rockville, Md.), Troponin-1 (Boston Life Sciences, Boston, Mass.), anti-Invasive Factor, retinoic acid and derivatives thereof, paclitaxel (Taxol), Suramin, Tissue Inhibitor of Metalloproteinase-1, Tissue Inhibitor of Metalloproteinase-2, VEGI, Plasminogen Activator Inhibitor-1, Plasminogen Activator Inhibitor-2, and various forms of the lighter “d group” transition metals.

[1192] Lighter “d group” transition metals include, for example, vanadium, molybdenum, tungsten, titanium, niobium, and tantalum species. Such transition metal species may form transition metal complexes. Suitable complexes of the above-mentioned transition metal species include oxo transition metal complexes.

[1193] Representative examples of vanadium complexes include oxo vanadium complexes such as vanadate and vanadyl complexes. Suitable vanadate complexes include metavanadate and orthovanadate complexes such as, for example, ammonium metavanadate, sodium metavanadate, and sodium orthovanadate. Suitable vanadyl complexes include, for example, vanadyl acetylacetonate and vanadyl sulfate including vanadyl sulfate hydrates such as vanadyl sulfate mono- and trihydrates.

[1194] Representative examples of tungsten and molybdenum complexes also include oxo complexes. Suitable oxo tungsten complexes include tungstate and tungsten oxide complexes. Suitable tungstate complexes include ammonium tungstate, calcium tungstate, sodium tungstate dihydrate, and tungstic acid. Suitable tungsten oxides include tungsten (IV) oxide and tungsten (VI) oxide. Suitable oxo molybdenum complexes include molybdate, molybdenum oxide, and molybdenyl complexes. Suitable molybdate complexes include ammonium molybdate and its hydrates, sodium molybdate and its hydrates, and potassium molybdate and its hydrates. Suitable molybdenum oxides include molybdenum (VI) oxide, molybdenum (VI) oxide, and molybdic acid. Suitable molybdenyl complexes include, for example, molybdenyl acetylacetonate. Other suitable tungsten and molybdenum complexes include hydroxo derivatives derived from, for example, glycerol, tartaric acid, and sugars.

[1195] A wide variety of other anti-angiogenic factors may also be utilized within the context of the present invention. Representative examples include, but are not limited to, platelet factor 4; protamine sulphate; sulphated chitin derivatives (prepared from queen crab shells), (Murata et al., Cancer Res. 51:22-26, (1991)); Sulphated Polysaccharide Peptidoglycan Complex (SP-PG) (the function of this compound may be enhanced by the presence of steroids such as estrogen, and tamoxifen citrate); Staurosporine; modulators of matrix metabolism, including for example, proline analogs, cishydroxyproline, d, L-3, 4-dehydroproline, Thiaproline, alpha, alpha-dipyridyl, aminopropionitrile fumarate; 4-propyl-5-(4-pyridinyl)-2(3H)-oxazolone; Methotrexate; Mitoxantrone; Heparin; Interferons; 2 Macroglobulin-serum; ChIMP-3 (Pavloffet al., J. Bio. Chem. 267:17321-17326, (1992)); Chymostatin (Tomkinson et al., Biochem J. 286:475-480, (1992)); Cyclodextrin Tetradecasulfate; Eponemycin; Camptothecin; Fumagillin (Ingber et al., Nature 348:555-557, (1990)); Gold Sodium Thiomalate (“GST”; Matsubara and Ziff, J. Clin. Invest. 79:1440-1446, (1987)); anticollagenase-serum; alpha2-antiplasmin (Holmes et al., J. Biol. Chem. 262(4):1659-1664, (1987)); Bisantrene (National Cancer Institute); Lobenzarit disodium (N-(2)-carboxyphenyl-4-chloroanthronilic acid disodium or “CCA”; (Takeuchi et al., Agents Actions 36:312-316, (1992)); and metalloproteinase inhibitors such as BB94.

[1196] Additional anti-angiogenic factors that may also be utilized within the context of the present invention include Thalidomide, (Celgene, Warren, N.J.); Angiostatic steroid; AGM-1470 (H. Brem and J. Folkman J Pediatr. Surg. 28:445-51 (1993)); an integrin alpha v beta 3 antagonist (C. Storgard et al., J Clin. Invest. 103:47-54 (1999)); carboxynaminolmidazole; Carboxyamidotriazole (CAI) (National Cancer Institute, Bethesda, Md.); Conbretastatin A-4 (CA4P) (OXiGENE, Boston, Mass.); Squalamine (Magainin Pharmaceuticals, Plymouth Meeting, PA); TNP-470, (Tap Pharmaceuticals, Deerfield, Ill.); ZD-0101 AstraZeneca (London, UK); APRA (CT2584); Benefin, Byrostatin-1 (SC339555); CGP-41251 (PKC 412); CM101; Dexrazoxane (ICRF187); DMXAA; Endostatin; Flavopridiol; Genestein; GTE; ImmTher; Iressa (ZD1839); Octreotide (Somatostatin); Panretin; Penacillamine; Photopoint; PI-88; Prinomastat (AG-3340) Purlytin; Suradista (FCE26644); Tamoxifen (Nolvadex); Tazarotene; Tetrathiomolybdate; Xeloda (Capecitabine); and 5-Fluorouracil.

[1197] Anti-angiogenic agents that may be administed in combination with the compounds of the invention may work through a variety of mechanisms including, but not limited to, inhibiting proteolysis of the extracellular matrix, blocking the function of endothelial cell-extracellular matrix adhesion molecules, by antagonizing the function of angiogenesis inducers such as growth factors, and inhibiting integrin receptors expressed on proliferating endothelial cells. Examples of anti-angiogenic inhibitors that interfere with extracellular matrix proteolysis and which may be administered in combination with the compositons of the invention include, but are not Imited to, AG-3340 (Agouron, La Jolla, Calif.), BAY-12-9566 (Bayer, West Haven, Conn.), BMS-275291 (Bristol Myers Squibb, Princeton, N.J.), CGS-27032A (Novartis, East Hanover, N.J.), Marimastat (British Biotech, Oxford, UK), and Metastat (Aetema, St-Foy, Quebec). Examples of anti-angiogenic inhibitors that act by blocking the function of endothelial cell-extracellular matrix adhesion molecules and which may be administered in combination with the compositons of the invention include, but are not imited to, EMD-121974 (Merck KcgaA Darmstadt, Germany) and Vitaxin (Ixsys, La Jolla, Calif./Medimmune, Gaithersburg, Md.). Examples of anti-angiogenic agents that act by directly antagonizing or inhibiting angiogenesis inducers and which may be administered in combination with the compositons of the invention include, but are not Imited to, Angiozyme (Ribozyme, Boulder, Colo.), Anti-VEGF antibody (Genentech, S. San Francisco, Calif.), PTK-787/ZK-225846 (Novartis, Basel, Switzerland), SU-101 (Sugen, S. San Francisco, Calif.), SU-5416 (Sugen/Pharmacia Upjohn, Bridgewater, N.J.), and SU-6668 (Sugen). Other anti-angiogenic agents act to indirectly inhibit angiogenesis. Examples of indirect inhibitors of angiogenesis which may be administered in combination with the compositons of the invention include, but are not limited to, IM-862 (Cytran, Kirkland, Wash.), Interferon-alpha, IL-12 (Roche, Nutley, N.J.), and Pentosan polysulfate (Georgetown University, Washington, D.C.).

[1198] In particular embodiments, the use of compositions of the invention in combination with anti-angiogenic agents is contemplated for the treatment, prevention, and/or amelioration of an autoimmune disease, such as for example, an autoimmune disease described herein.

[1199] In a particular embodiment, the use of compositions of the invention in combination with anti-angiogenic agents is contemplated for the treatment, prevention, and/or amelioration of arthritis. In a more particular embodiment, the use of compositions of the invention in combination with anti-angiogenic agents is contemplated for the treatment, prevention, and/or amelioration of rheumatoid arthritis.

[1200] In another embodiment, the polynucleotides encoding a polypeptide of the present invention are administered in combination with an angiogenic protein, or polynucleotides encoding an angiogenic protein. Examples of angiogenic proteins that may be administered with the compositions of the invention include, but are not limited to, acidic and basic fibroblast growth factors, VEGF-1, VEGF-2, VEGF-3, epidermal growth factor alpha and beta, platelet-derived endothelial cell growth factor, platelet-derived growth factor, tumor necrosis factor alpha, hepatocyte growth factor, insulin-like growth factor, colony stimulating factor, macrophage colony stimulating factor, granulocyte/macrophage colony stimulating factor, and nitric oxide synthase.

[1201] In additional embodiments, compositions of the invention are administered in combination with a chemotherapeutic agent. Chemotherapeutic agents that may be administered with the Therapeutics of the invention include, but are not limited to alkylating agents such as nitrogen mustards (for example, Mechlorethamine, cyclophosphamide, Cyclophosphamide Ifosfamide, Melphalan (L-sarcolysin), and Chlorambucil), ethylenimines and methylmelamines (for example, Hexamethylmelamine and Thiotepa), alkyl sulfonates (for example, Busulfan), nitrosoureas (for example, Carmustine (BCNU), Lomustine (CCNU), Semustine (methyl-CCNU), and Streptozocin (streptozotocin)), triazenes (for example, Dacarbazine (DTIC; dimethyltriazenoimidazolecarboxamide)), folic acid analogs (for example, Methotrexate (amethopterin)), pyrimidine analogs (for example, Fluorouacil (5-fluorouracil; 5-FU), Floxuridine (fluorodeoxyuridine; FudR), and Cytarabine (cytosine arabinoside)), purine analogs and related inhibitors (for example, Mercaptopurine (6-mercaptopurine; 6-MP), Thioguanine (6-thioguanine; TG), and Pentostatin (2′-deoxycoformycin)), vinca alkaloids (for example, Vinblastine (VLB, vinblastine sulfate)) and Vincristine (vincristine sulfate)), epipodophyllotoxins (for example, Etoposide and Teniposide), antibiotics (for example, Dactinomycin (actinomycin D), Daunorubicin (daunomycin; rubidomycin), Doxorubicin, Bleomycin, Plicamycin (mithramycin), and Mitomycin (mitomycin C), enzymes (for example, L-Asparaginase), biological response modifiers (for example, Interferon-alpha and interferon-alpha-2b), platinum coordination compounds (for example, Cisplatin (cis-DDP) and Carboplatin), anthracenedione (Mitoxantrone), substituted ureas (for example, Hydroxyurea), methylhydrazine derivatives (for example, Procarbazine (N-methylhydrazine; M1H), adrenocorticosteroids (for example, Prednisone), progestins (for example, Hydroxyprogesterone caproate, Medroxyprogesterone, Medroxyprogesterone acetate, and Megestrol acetate), estrogens (for example, Diethylstilbestrol (DES), Diethylstilbestrol diphosphate, Estradiol, and Ethinyl estradiol), antiestrogens (for example, Tamoxifen), androgens (Testosterone proprionate, and Fluoxymesterone), antiandrogens (for example, Flutamide), gonadotropin-releasing horomone analogs (for example, Leuprolide), other hormones and hormone analogs (for example, methyltestosterone, estramustine, estramustine phosphate sodium, chlorotrianisene, and testolactone), and others (for example, dicarbazine, glutamic acid, and mitotane).

[1202] In one embodiment, the compositions of the invention are administered in combination with one or more of the following drugs: infliximab (also known as Remicade™ Centocor, Inc.), Trocade (Roche, RO-32-3555), Leflunomide (also known as Arava™ from Hoechst Marion Roussel), Kineret™ (an IL-1 Receptor antagonist also known as Anakinra from Amgen, Inc.).

[1203] In a specific embodiment, compositions of the invention are administered in combination with CHOP (cyclophosphamide, doxorubicin, vincristine, and prednisone) or combination of one or more of the components of CHOP. In one embodiment, the compositions of the invention are administered in combination with anti-CD20 antibodies, human monoclonal anti-CD20 antibodies. In another embodiment, the compositions of the invention are administered in combination with anti-CD20 antibodies and CHOP, or anti-CD20 antibodies and any combination of one or more of the components of CHOP, particularly cyclophosphamide and/or prednisone. In a specific embodiment, compositions of the invention are administered in combination with Rituximab. In a further embodiment, compositions of the invention are administered with Rituximab and CHOP, or Rituximab and any combination of one or more of the components of CHOP, particularly cyclophosphamide and/or prednisone. In a specific embodiment, compositions of the invention are administered in combination with tositumomab. In a further embodiment, compositions of the invention are administered with tositumomab and CHOP, or tositumomab and any combination of one or more of the components of CHOP, particularly cyclophosphamide and/or prednisone. The anti-CD20 antibodies may optionally be associated with radioisotopes, toxins or cytotoxic prodrugs.

[1204] In another specific embodiment, the compositions of the invention are administered in combination Zevalin™. In a further embodiment, compositions of the invention are administered with Zevalin™ and CHOP, or Zevalin™ and any combination of one or more of the components of CHOP, particularly cyclophosphamide and/or prednisone. Zevalin™ may be associated with one or more radisotopes. Particularly preferred isotopes are ⁹⁰Y and ¹¹¹In.

[1205] In an additional embodiment, the Therapeutics of the invention are administered in combination with cytokines. Cytokines that may be administered with the Therapeutics of the invention include, but are not limited to, IL2, IL3, IL4, IL5, IL6, IL7, IL10, IL12, IL13, IL15, anti-CD40, CD40L, IFN-gamma and TNF-alpha. In another embodiment, Therapeutics of the invention may be administered with any interleukin, including, but not limited to, IL-1alpha, IL-1beta, IL-2, IL-3, IL-4, IL-5, IL-6, IL-7, IL-8, IL-9, IL-10, IL-11, IL-12, IL-13, IL-14, IL-1S, IL-16, IL-17, IL-18, IL-19, IL-20, and IL-21.

[1206] In one embodiment, the Therapeutics of the invention are administered in combination with members of the TNF family. TNF, TNF-related or TNF-like molecules that may be administered with the Therapeutics of the invention include, but are not limited to, soluble forms of TNF-alpha, lymphotoxin-alpha (LT-alpha, also known as TNF-beta), LT-beta (found in complex heterotrimer LT-alpha2-beta), OPGL, FasL, CD27L, CD30L, CD40L, 4-1BBL, DcR3, OX40L, TNF-gamma (International Publication No. WO 96/14328), AIM-I (International Publication No. WO 97/33899), endokine-alpha (International Publication No. WO 98/07880), OPG, and neutrokine-alpha (International Publication No. WO 98/18921, OX40, and nerve growth factor (NGF), and soluble forms of Fas, CD30, CD27, CD40 and 4-IBB, TR2 (International Publication No. WO 96/34095), DR3 (International Publication No. WO 97/33904), DR4 (International Publication No. WO 98/32856), TR5 (International Publication No. WO 98/30693), TRANK, TR9 (International Publication No. WO 98/56892), TR10 (International Publication No. WO 98/54202), 312C2 (International Publication No. WO 98/06842), and TR12, and soluble forms CD154, CD70, and CD153.

[1207] In an additional embodiment, the Therapeutics of the invention are administered in combination with angiogenic proteins. Angiogenic proteins that may be administered with the Therapeutics of the invention include, but are not limited to, Glioma Derived Growth Factor (GDGF), as disclosed in European Patent Number EP-399816; Platelet Derived Growth Factor-A (PDGF-A), as disclosed in European Patent Number EP-682110; Platelet Derived Growth Factor-B (PDGF-B), as disclosed in European Patent Number EP-282317; Placental Growth Factor (PlGF), as disclosed in International Publication Number WO 92/06194; Placental Growth Factor-2 (PlGF-2), as disclosed in Hauser et al., Growth Factors, 4:259-268 (1993); Vascular Endothelial Growth Factor (VEGF), as disclosed in International Publication Number WO 90/13649; Vascular Endothelial Growth Factor-A (VEGF-A), as disclosed in European Patent Number EP-506477; Vascular Endothelial Growth Factor-2 (VEGF-2), as disclosed in International Publication Number WO 96/39515; Vascular Endothelial Growth Factor B (VEGF-3); Vascular Endothelial Growth Factor B-186 (VEGF-B 186), as disclosed in International Publication Number WO 96/26736; Vascular Endothelial Growth Factor-D (VEGF-D), as disclosed in International Publication Number WO 98/02543; Vascular Endothelial Growth Factor-D (VEGF-D), as disclosed in International Publication Number WO 98/07832; and Vascular Endothelial Growth Factor-E (VEGF-E), as disclosed in German Patent Number DE19639601. The above mentioned references are herein incorporated by reference in their entireties.

[1208] In an additional embodiment, the Therapeutics of the invention are administered in combination with Fibroblast Growth Factors. Fibroblast Growth Factors that may be administered with the Therapeutics of the invention include, but are not limited to, FGF-1, FGF-2, FGF-3, FGF-4, FGF-5, FGF-6, FGF-7, FGF-8, FGF-9, FGF-10, FGF-11, FGF-12, FGF-13, FGF-14, and FGF-15.

[1209] In an additional embodiment, the Therapeutics of the invention are administered in combination with hematopoietic growth factors. Hematopoietic growth factors that may be administered with the Therapeutics of the invention include, but are not limited to, granulocyte macrophage colony stimulating factor (GM-CSF) (sargramostim, LEUKINE™, PROKINE™), granulocyte colony stimulating factor (G-CSF) (filgrastim, NEUPOGEN™), macrophage colony stimulating factor (M-CSF, CSF-1) erythropoietin (epoetin alfa, EPOGEN™, PROCRIT™), stem cell factor (SCF, c-kit ligand, steel factor), megakaryocyte colony stimulating factor, PIXY321 (a GMCSF/IL-3 fusion protein), interleukins, especially any one or more of IL-1 through IL-12, interferon-gamma, or thrombopoietin.

[1210] In certain embodiments, Therapeutics of the present invention are administered in combination with adrenergic blockers, such as, for example, acebutolol, atenolol, betaxolol, bisoprolol, carteolol, labetalol, metoprolol, nadolol, oxprenolol, penbutolol, pindolol, propranolol, sotalol, and timolol.

[1211] In another embodiment, the Therapeutics of the invention are administered in combination with an antiarrhythmic drug (e.g., adenosine, amidoarone, bretylium, digitalis, digoxin, digitoxin, diliazem, disopyramide, esmolol, flecainide, lidocaine, mexiletine, moricizine, phenyloin, procainamide, N-acetyl procainamide, propafenone, propranolol, quinidine, sotalol, tocainide, and verapamil).

[1212] In another embodiment, the Therapeutics of the invention are administered in combination with diuretic agents, such as carbonic anhydrase-inhibiting agents (e.g., acetazolamide, dichlorphenamide, and methazolamide), osmotic diuretics (e.g., glycerin, isosorbide, mannitol, and urea), diuretics that inhibit Na⁺-K⁺-2Cl⁻ symport (e.g., furosemide, bumetamide, azosemide, piretamide, tripamide, ethacrynic acid, muzolimine, and torsemide), thiazide and thiazide-like diuretics (e.g., bendroflumethiazide, benzthiazide, chlorothiazide, hydrochlorothiazide, hydroflumethiazide, methyclothiazide, polythiazide, trichormethiazide, chlorthalidone, indapamide, metolazone, and quinethazone), potassium sparing diuretics (e.g., amiloride and triamterene), and mineralcorticoid receptor antagonists (e.g., spironolactone, canrenone, and potassium canrenoate).

[1213] In one embodiment, the Therapeutics of the invention are administered in combination with treatments for endocrine and/or hormone imbalance disorders. Treatments for endocrine and/or hormone imbalance disorders include, but are not limited to, ¹²⁷I, radioactive isotopes of iodine such as ¹³¹I and ¹²³I; recombinant growth hormone, such as HUMATROPE™ (recombinant somatropin); growth hormone analogs such as PROTROPIN™ (somatrem); dopamine agonists such as PARLODEL™ (bromocriptine); somatostatin analogs such as SANDOSTATIN™ (octreotide); gonadotropin preparations such as PREGNYL™, A.P.L.™ and PROFASI™ (chorionic gonadotropin (CG)), PERGONAL™ (menotropins), and METRODIN™ (urofollitropin (uFSH)); synthetic human gonadotropin releasing hormone preparations such as FACTREL™ and LUTREPULSE™ (gonadorelin hydrochloride); synthetic gonadotropin agonists such as LUPRON™ (leuprolide acetate), SUPPRELIN™ (histrelin acetate), SYNAREL™ (nafarelin acetate), and ZOLADEX™ (goserelin acetate); synthetic preparations of thyrotropin-releasing hormone such as RELEFACT TRH™ and THYPINONE™ (protirelin); recombinant human TSH such as THYROGEN™; synthetic preparations of the sodium salts of the natural isomers of thyroid hormones such as L-T₄™, SYNTHROID™ and LEVOTHROID™ (levothyroxine sodium), L-T₃™, CYTOMEL™ and TRIOSTAT™ (liothyroine sodium), and THYROLAR™ (liotrix); antithyroid compounds such as 6-n-propylthiouracil (propylthiouracil), 1-methyl-2-mercaptoimidazole and TAPAZOLE™ (methimazole), NEO-MERCAZOLE™ (carbimazole); beta-adrenergic receptor antagonists such as propranolol and esmolol; Ca²⁺ channel blockers; dexamethasone and iodinated radiological contrast agents such as TELEPAQUE™ (iopanoic acid) and ORAGRAFIN™ (sodium ipodate).

[1214] Additional treatments for endocrine and/or hormone imbalance disorders include, but are not limited to, estrogens or congugated estrogens such as ESTRACE™ (estradiol), ESTINYL™ (ethinyl estradiol), PREMARIN™, ESTRATAB™, ORTHO-EST™, OGEN™ and estropipate (estrone), ESTROVIS™ (quinestrol), ESTRADERM™ (estradiol), DELESTROGEN™ and VALERGEN™ (estradiol valerate), DEPO-ESTRADIOL CYPIONATE™ and ESTROJECT LA™ (estradiol cypionate); antiestrogens such as NOLVADEX™ (tamoxifen), SEROPHENE™ and CLOMID™ (clomiphene); progestins such as DURALUTIN™ (hydroxyprogesterone caproate), MPA™ and DEPO-PROVERA™ (medroxyprogesterone acetate), PROVERA™ and CYCRIN™ (MPA), MEGACE™ (megestrol acetate), NORLUTIN™ (norethindrone), and NORLUTATETM and AYGESTIN™ (norethindrone acetate); progesterone implants such as NORPLANT SYSTEM™ (subdermal implants of norgestrel); antiprogestins such as RU 486™ (mifepristone); hormonal contraceptives such as ENOVID™ (norethynodrel plus mestranol), PROGESTASERT™ (intrauterine device that releases progesterone), LOESTRIN™, BREVICON™, MODICON™, GENORA™, NELONA™, NORINYL™, OVACON-35™ and OVACON-50™ (ethinyl estradiol/norethindrone), LEVLEN™, NORDETTE™, TR1-LEVLEN™ and TRIPHASIL-21™ (ethinyl estradiol/levonorgestrel) LO/OVRAL™ and OVRAL™ (ethinyl estradiol/norgestrel), DEMULEN™ (ethinyl estradiol/ethynodiol diacetate), NORNYL™, ORTHO-NOVUM™, NORETHIN™, GENORA™, and NELOVA™ (norethindrone/mestranol), DESOGEN™ and ORTHO-CEPT™ (ethinyl estradiol/desogestrel), ORTHO-CYCLEN™ and ORTHO-TRICYCLEN™ (ethinyl estradiol/norgestimate), MICRONOR™ and NOR-QD™ (norethindrone), and OVRETTE™ (norgestrel).

[1215] Additional treatments for endocrine and/or hormone imbalance disorders include, but are not limited to, testosterone esters such as methenolone acetate and testosterone undecanoate; parenteral and oral androgens such as TESTOJECT-50™ (testosterone), TESTEX™ (testosterone propionate), DELATESTRYL™ (testosterone enanthate), DEPO-TESTOSTERONE™ (testosterone cypionate), DANOCRINE™ (danazol), HALOTESTIN™ (fluoxymesterone), ORETON METHYL™, TESTRED™ and VIRILON™ (methyltestosterone), and OXANDRIN™ (oxandrolone); testosterone transdermal systems such as TESTODERM™; androgen receptor antagonist and 5-alpha-reductase inhibitors such as ANDROCUR™ (cyproterone acetate), EULEXIN™ (flutamide), and PROSCAR™ (finasteride); adrenocorticotropic hormone preparations such as CORTROSYN™ (cosyntropin); adrenocortical steroids and their synthetic analogs such as ACLOVATE™ (alclometasone dipropionate), CYCLOCORT™ (amcinonide), BECLOVENT™ and VANCERIL™ (beclomethasone dipropionate), CELESTONE™ (betamethasone), BENISONE™ and UTICORT™ (betamethasone benzoate), DIPROSONE™ (betamethasone dipropionate), CELESTONE PHOSPHATE™ (betamethasone sodium phosphate), CELESTONE SOLUSPAN™ (betamethasone sodium phosphate and acetate), BETA-VAL™ and VALISONE™ (betamethasone valerate), TEMOVATE™ (clobetasol propionate), CLODERM™ (clocortolone pivalate), CORTEF™ and HYDROCORTONE™ (cortisol (hydrocortisone)), HYDROCORTONE ACETATE™ (cortisol (hydrocortisone) acetate), LOCOID™ (cortisol (hydrocortisone) butyrate), HYDROCORTONE PHOSPHATE™ (cortisol (hydrocortisone) sodium phosphate), A-HYDROCORT™ and SOLU CORTEF™ (cortisol (hydrocortisone) sodium succinate), WESTCORT™ (cortisol (hydrocortisone) valerate), CORTISONE ACETATE™ (cortisone acetate), DESOWEN™ and TRIDESILON™ (desonide), TOPICORT™ (desoximetasone), DECADRON™ (dexamethasone), DECADRON LA™ (dexamethasone acetate), DECADRON PHOSPHATE™ and HEXADROL PHOSPHATE™ (dexamethasone sodium phosphate), FLORONE™ and MAXIFLOR™ (diflorasone diacetate), FLORINEF ACETATE™ (fludrocortisone acetate), AEROBID™ and NASALIDE™ (flunisolide), FLUONID™ and SYNALAR™ (fluocinolone acetonide), LIDEX™ (fluocinonide), FLUOR-OP™ and FML™ (fluorometholone), CORDRAN™ (flurandrenolide), HALOG™ (halcinonide), HMS LIZUIFILM™ (medrysone), MEDROL™ (methylprednisolone), DEPO-MEDROL™ and MEDROL ACETATETM (methylprednisone acetate), A-METHAPRED™ and SOLUMEDROL™ (methylprednisolone sodium succinate), ELOCON™ (mometasone furoate), HALDRONE™ (paramethasone acetate), DELTA-CORTEF™ (prednisolone), ECONOPRED™ (prednisolone acetate), HYDELTRASOL™ (prednisolone sodium phosphate), HYDELTRA-T.B.A™ (prednisolone tebutate), DELTASONE™ (prednisone), ARISTOCORT™ and KENACORT™ (triamcinolone), KENALOG™ (triamcinolone acetonide), ARISTOCORT™ and KENACORT DIACETATE™ (triamcinolone diacetate), and ARISTOSPAN™ (triamcinolone hexacetonide); inhibitors of biosynthesis and action of adrenocortical steroids such as CYTADREN™ (aminoglutethimide), NIZORAL™ (ketoconazole), MODRASTANE™ (trilostane), and METOPIRONE™ (metyrapone).

[1216] Additional treatments for endocrine and/or hormone imbalance disorders include, but are not limited to bovine, porcine or human insulin or mixtures thereof; insulin analogs; recombinant human insulin such as HUMULIN™ and NOVOLIN™; oral hypoglycemic agents such as ORAMIDE™ and ORINASE™ (tolbutamide), DIABINESE™ (chlorpropamide), TOLAMIDE™ and TOLINASE™ (tolazamide), DYMELOR™ (acetohexamide), glibenclamide, MICRONASE™, DIBETA™ and GLYNASE™ (glyburide), GLUCOTROL™ (glipizide), and DIAMICRON™ (gliclazide), GLUCOPHAGE™ (metformin), PRECOSE™ (acarbose), AMARYL™ (glimepiride), and ciglitazone; thiazolidinediones (TZDs) such as rosiglitazone, AVANDIA™ (rosiglitazone maleate) ACTOS™ (piogliatazone), and troglitazone; alpha-glucosidase inhibitors; bovine or porcine glucagon; somatostatins such as SANDOSTATIN™ (octreotide); and diazoxides such as PROGLYCEM™ (diazoxide). In still other embodiments, Therapeutics of the invention are administered in combination with one or more of the following: a biguanide antidiabetic agent, a glitazone antidiabetic agent, and a sulfonylurea antidiabetic agent.

[1217] In one embodiment, the Therapeutics of the invention are administered in combination with treatments for uterine motility disorders. Treatments for uterine motility disorders include, but are not limited to, estrogen drugs such as conjugated estrogens (e.g., PREMARIN® and ESTRATAB®), estradiols (e.g., CLIMARA® and ALORA®), estropipate, and chlorotrianisene; progestin drugs (e.g., AMEN® (medroxyprogesterone), MICRONOR® (norethidrone acetate), PROMETRIUM® progesterone, and megestrol acetate); and estrogen/progesterone combination therapies such as, for example, conjugated estrogens/medroxyprogesterone (e.g., PREMPRO™ and PREMPHASE®) and norethindrone acetate/ethinyl estsradiol (e.g., FEMHRT™).

[1218] In an additional embodiment, the Therapeutics of the invention are administered in combination with drugs effective in treating iron deficiency and hypochromic anemias, including but not limited to, ferrous sulfate (iron sulfate, FEOSOL™), ferrous fumarate (e.g., FEOSTAT™), ferrous gluconate (e.g., FERGON™), polysaccharide-iron complex (e.g., NIFEREX™), iron dextran injection (e.g., INFED™), cupric sulfate, pyroxidine, riboflavin, Vitamin B₁₂, cyancobalamin injection (e.g., REDISOL™, RUBRAMIN PC™), hydroxocobalamin, folic acid (e.g., FOLVITE™), leucovorin (folinic acid, 5-CHOH4PteGlu, citrovorum factor) or WELLCOVORIN (Calcium salt of leucovorin), transferrin or ferritin.

[1219] In certain embodiments, the Therapeutics of the invention are administered in combination with agents used to treat psychiatric disorders. Psychiatric drugs that may be administered with the Therapeutics of the invention include, but are not limited to, antipsychotic agents (e.g., chlorpromazine, chlorprothixene, clozapine, fluphenazine, haloperidol, loxapine, mesoridazine, molindone, olanzapine, perphenazine, pimozide, quetiapine, risperidone, thioridazine, thiothixene, trifluoperazine, and triflupromazine), antimanic agents (e.g., carbamazepine, divalproex sodium, lithium carbonate, and lithium citrate), antidepressants (e.g., amitriptyline, amoxapine, bupropion, citalopram, clomipramine, desipramine, doxepin, fluvoxamine, fluoxetine, imipramine, isocarboxazid, maprotiline, mirtazapine, nefazodone, nortriptyline, paroxetine, phenelzine, protriptyline, sertraline, tranylcypromine, trazodone, trimipramine, and venlafaxine), antianxiety agents (e.g., alprazolam, buspirone, chlordiazepoxide, clorazepate, diazepam, halazepam, lorazepam, oxazepam, and prazepam), and stimulants (e.g., d-amphetamine, methylphenidate, and pemoline).

[1220] In other embodiments, the Therapeutics of the invention are administered in combination with agents used to treat neurological disorders. Neurological agents that may be administered with the Therapeutics of the invention include, but are not limited to, antiepileptic agents (e.g., carbamazepine, clonazepam, ethosuximide, phenobarbital, phenyloin, primidone, valproic acid, divalproex sodium, felbamate, gabapentin, lamotrigine, levetiracetam, oxcarbazepine, tiagabine, topiramate, zonisamide, diazepam, lorazepam, and clonazepam), antiparkinsonian agents (e.g., levodopa/carbidopa, selegiline, amantidine, bromocriptine, pergolide, ropinirole, pramipexole, benztropine; biperiden; ethopropazine; procyclidine; trihexyphenidyl, tolcapone), and ALS therapeutics (e.g. riluzole).

[1221] In another embodiment, Therapeutics of the invention are administered in combination with vasodilating agents and/or calcium channel blocking agents. Vasodilating agents that may be administered with the Therapeutics of the invention include, but are not limited to, Angiotensin Converting Enzyme (ACE) inhibitors (e.g., papaverine, isoxsuprine, benazepril, captopril, cilazapril, enalapril, enalaprilat, fosinopril, lisinopril, moexipril, perindopril, quinapril, ramipril, spirapril, trandolapril, and nylidrin), and nitrates (e.g., isosorbide dinitrate, isosorbide mononitrate, and nitroglycerin). Examples of calcium channel blocking agents that may be administered in combination with the Therapeutics of the invention include, but are not limited to amlodipine, bepridil, diltiazem, felodipine, flunarizine, isradipine, nicardipine, nifedipine, nimodipine, and verapamil.

[1222] In additional embodiments, the Therapeutics of the invention are administered in combination with other therapeutic or prophylactic regimens, such as, for example, radiation therapy.

### Example 24

### Method of Treating Decreased Levels of the Polypeptide

[1223] The present invention relates to a method for treating an individual in need of an increased level of a polypeptide of the invention in the body comprising administering to such an individual a composition comprising a therapeutically effective amount of an agonist of the invention (including polypeptides of the invention). Moreover, it will be appreciated that conditions caused by a decrease in the standard or normal expression level of a secreted protein in an individual can be treated by administering the polypeptide of the present invention, preferably in the secreted form. Thus, the invention also provides a method of treatment of an individual in need of an increased level of the polypeptide comprising administering to such an individual a Therapeutic comprising an amount of the polypeptide to increase the activity level of the polypeptide in such an individual.

[1224] For example, a patient with decreased levels of a polypeptide receives a daily dose 0.1-100 ug/kg of the polypeptide for six consecutive days. Preferably, the polypeptide is in the secreted form. The exact details of the dosing scheme, based on administration and formulation, are provided in Example 23.

### Example 25

### Method of Treating Increased Levels of the Polypeptide

[1225] The present invention also relates to a method of treating an individual in need of a decreased level of a polypeptide of the invention in the body comprising administering to such an individual a composition comprising a therapeutically effective amount of an antagonist of the invention (including polypeptides and antibodies of the invention).

[1226] In one example, antisense technology is used to inhibit production of a polypeptide of the present invention. This technology is one example of a method of decreasing levels of a polypeptide, preferably a secreted form, due to a variety of etiologies, such as cancer. For example, a patient diagnosed with abnormally increased levels of a polypeptide is administered intravenously antisense polynucleotides at 0.5, 1.0, 1.5, 2.0 and 3.0 mg/kg day for 21 days. This treatment is repeated after a 7-day rest period if the treatment was well tolerated. The formulation of the antisense polynucleotide is provided in Example 23.

### Example 26

### Method of Treatment Using Gene Therapy—Ex Vivo

[1227] One method of gene therapy transplants fibroblasts, which are capable of expressing a polypeptide, onto a patient. Generally, fibroblasts are obtained from a subject by skin biopsy. The resulting tissue is placed in tissue-culture medium and separated into small pieces. Small chunks of the tissue are placed on a wet surface of a tissue culture flask, approximately ten pieces are placed in each flask. The flask is turned upside down, closed tight and left at room temperature over night. After 24 hours at room temperature, the flask is inverted and the chunks of tissue remain fixed to the bottom of the flask and fresh media (e.g., Ham's F12 media, with 10% FBS, penicillin and streptomycin) is added. The flasks are then incubated at 37 degree C. for approximately one week.

[1228] At this time, fresh media is added and subsequently changed every several days. After an additional two weeks in culture, a monolayer of fibroblasts emerge. The monolayer is trypsinized and scaled into larger flasks.

[1229] pMV-7 (Kirschmeier, P. T. et al., DNA, 7:219-25 (1988)), flanked by the long terminal repeats of the Moloney murine sarcoma virus, is digested with EcoRI and HindIII and subsequently treated with calf intestinal phosphatase. The linear vector is fractionated on agarose gel and purified, using glass beads.

[1230] The cDNA encoding a polypeptide of the present invention can be amplified using PCR primers which correspond to the 5′ and 3′ end sequences respectively as set forth in Example 1 using primers and having appropriate restriction sites and initiation/stop codons, if necessary. Preferably, the 5′ primer contains an EcoRI site and the 3′ primer includes a HindIII site. Equal quantities of the Moloney murine sarcoma virus linear backbone and the amplified EcoRI and HindIII fragment are added together, in the presence of T4 DNA ligase. The resulting mixture is maintained under conditions appropriate for ligation of the two fragments. The ligation mixture is then used to transform bacteria HB101, which are then plated onto agar containing kanamycin for the purpose of confirming that the vector has the gene of interest properly inserted.

[1231] The amphotropic pA317 or GP+am12 packaging cells are grown in tissue culture to confluent density in Dulbecco's Modified Eagles Medium (DMEM) with 10% calf serum (CS), penicillin and streptomycin. The MSV vector containing the gene is then added to the media and the packaging cells transduced with the vector. The packaging cells now produce infectious viral particles containing the gene (the packaging cells are now referred to as producer cells).

[1232] Fresh media is added to the transduced producer cells, and subsequently, the media is harvested from a 10 cm plate of confluent producer cells. The spent media, containing the infectious viral particles, is filtered through a millipore filter to remove detached producer cells and this media is then used to infect fibroblast cells. Media is removed from a sub-confluent plate of fibroblasts and quickly replaced with the media from the producer cells. This media is removed and replaced with fresh media. If the titer of virus is high, then virtually all fibroblasts will be infected and no selection is required. If the titer is very low, then it is necessary to use a retroviral vector that has a selectable marker, such as neo or his. Once the fibroblasts have been efficiently infected, the fibroblasts are analyzed to determine whether protein is produced.

[1233] The engineered fibroblasts are then transplanted onto the host, either alone or after having been grown to confluence on cytodex 3 microcarrier beads.

### Example 27

### Gene Therapy Using Endogenous Genes Corresponding to Polynucleotides of the Invention

[1234] Another method of gene therapy according to the present invention involves operably associating the endogenous polynucleotide sequence of the invention with a promoter via homologous recombination as described, for example, in U.S. Pat. No. 5,641,670, issued Jun. 24, 1997; International Publication NO: WO 96/29411, published Sep. 26, 1996; International Publication NO: WO 94/12650, published Aug. 4, 1994; Koller et al., Proc. Natl. Acad. Sci. USA, 86:8932-8935 (1989); and Zijlstra et al., Nature, 342:435-438 (1989). This method involves the activation of a gene which is present in the target cells, but which is not expressed in the cells, or is expressed at a lower level than desired.

[1235] Polynucleotide constructs are made which contain a promoter and targeting sequences, which are homologous to the 5′ non-coding sequence of endogenous polynucleotide sequence, flanking the promoter. The targeting sequence will be sufficiently near the 5′ end of the polynucleotide sequence so the promoter will be operably linked to the endogenous sequence upon homologous recombination. The promoter and the targeting sequences can be amplified using PCR. Preferably, the amplified promoter contains distinct restriction enzyme sites on the 5′ and 3′ ends. Preferably, the 3′ end of the first targeting sequence contains the same restriction enzyme site as the 5′ end of the amplified promoter and the 5′ end of the second targeting sequence contains the same restriction site as the 3′ end of the amplified promoter.

[1236] The amplified promoter and the amplified targeting sequences are digested with the appropriate restriction enzymes and subsequently treated with calf intestinal phosphatase. The digested promoter and digested targeting sequences are added together in the presence of T4 DNA ligase. The resulting mixture is maintained under conditions appropriate for ligation of the two fragments. The construct is size fractionated on an agarose gel then purified by phenol extraction and ethanol precipitation.

[1237] In this Example, the polynucleotide constructs are administered as naked polynucleotides via electroporation. However, the polynucleotide constructs may also be administered with transfection-facilitating agents, such as liposomes, viral sequences, viral particles, precipitating agents, etc. Such methods of delivery are known in the art.

[1238] Once the cells are transfected, homologous recombination will take place which results in the promoter being operably linked to the endogenous polynucleotide sequence. This results in the expression of polynucleotide corresponding to the polynucleotide in the cell. Expression may be detected by immunological staining, or any other method known in the art.

[1239] Fibroblasts are obtained from a subject by skin biopsy. The resulting tissue is placed in DMEM+10% fetal calf serum. Exponentially growing or early stationary phase fibroblasts are trypsinized and rinsed from the plastic surface with nutrient medium. An aliquot of the cell suspension is removed for counting, and the remaining cells are subjected to centrifugation. The supernatant is aspirated and the pellet is resuspended in 5 ml of electroporation buffer (20 mM HEPES pH 7.3, 137 mM NaCl, 5 mM KCl, 0.7 mM Na₂ HPO₄, 6 mM dextrose). The cells are recentrifuged, the supernatant aspirated, and the cells resuspended in electroporation buffer containing 1 mg/ml acetylated bovine serum albumin. The final cell suspension contains approximately 3×10⁶ cells/ml. Electroporation should be performed immediately following resuspension.

[1240] Plasmid DNA is prepared according to standard techniques. For example, to construct a plasmid for targeting to the locus corresponding to the polynucleotide of the invention, plasmid pUC18 (MBI Fermentas, Amherst, N.Y.) is digested with HindIII. The CMV promoter is amplified by PCR with an XbaI site on the 5′ end and a BamHI site on the 3′end. Two non-coding sequences are amplified via PCR: one non-coding sequence (fragment 1) is amplified with a HindIII site at the 5′ end and an Xba site at the 3′end; the other non-coding sequence (fragment 2) is amplified with a BamHI site at the 5′end and a HindIII site at the 3′end. The CMV promoter and the fragments (1 and 2) are digested with the appropriate enzymes (CMV promoter—XbaI and BamHI; fragment 1—XbaI; fragment 2—BamHI) and ligated together. The resulting ligation product is digested with HindIII, and ligated with the HindIII-digested pUC 18 plasmid.

[1241] Plasmid DNA is added to a sterile cuvette with a 0.4 cm electrode gap (Bio-Rad). The final DNA concentration is generally at least 120 μg/ml. 0.5 ml of the cell suspension (containing approximately 1.5×10⁶ cells) is then added to the cuvette, and the cell suspension and DNA solutions are gently mixed. Electroporation is performed with a Gene-Pulser apparatus (Bio-Rad). Capacitance and voltage are set at 960 μF and 250-300 V, respectively. As voltage increases, cell survival decreases, but the percentage of surviving cells that stably incorporate the introduced DNA into their genome increases dramatically. Given these parameters, a pulse time of approximately 14-20 mSec should be observed.

[1242] Electroporated cells are maintained at room temperature for approximately 5 min, and the contents of the cuvette are then gently removed with a sterile transfer pipette. The cells are added directly to 10 ml of prewarmed nutrient media (DMEM with 15% calf serum) in a 10 cm dish and incubated at 37 degree C. The following day, the media is aspirated and replaced with 10 ml of fresh media and incubated for a further 16-24 hours.

[1243] The engineered fibroblasts are then injected into the host, either alone or after having been grown to confluence on cytodex 3 microcarrier beads. The fibroblasts now produce the protein product. The fibroblasts can then be introduced into a patient as described above.

### Example 28

### Method of Treatment Using Gene Therapy—In Vivo

[1244] Another aspect of the present invention is using in vivo gene therapy methods to treat disorders, diseases and conditions. The gene therapy method relates to the introduction of naked nucleic acid (DNA, RNA, and antisense DNA or RNA) sequences into an animal to increase or decrease the expression of the polypeptide. The polynucleotide of the present invention may be operatively linked to a promoter or any other genetic elements necessary for the expression of the polypeptide by the target tissue. Such gene therapy and delivery techniques and methods are known in the art, see, for example, WO90/11092, WO98/11779; U.S. Pat. Nos. 5,693,622, 5,705,151, 5,580,859; Tabata et al., Cardiovasc. Res. 35(3):470-479 (1997); Chao et al., Pharmacol. Res. 35(6):517-522 (1997); Wolff, Neuromuscul. Disord. 7(5):314-318 (1997); Schwartz et al., Gene Ther. 3(5):405-411 (1996); Tsurumi et al., Circulation 94(12):3281-3290 (1996) (incorporated herein by reference).

[1245] The polynucleotide constructs may be delivered by any method that delivers injectable materials to the cells of an animal, such as, injection into the interstitial space of tissues (heart, muscle, skin, lung, liver, intestine and the like). The polynucleotide constructs can be delivered in a pharmaceutically acceptable liquid or aqueous carrier.

[1246] The term “naked” polynucleotide, DNA or RNA, refers to sequences that are free from any delivery vehicle that acts to assist, promote, or facilitate entry into the cell, including viral sequences, viral particles, liposome formulations, lipofectin or precipitating agents and the like. However, the polynucleotides of the present invention may also be delivered in liposome formulations (such as those taught in Felgner P. L. et al. (1995) Ann. NY Acad. Sci. 772:126-139 and Abdallah B. et al. (1995) Biol. Cell 85(1):1-7) which can be prepared by methods well known to those skilled in the art.

[1247] The polynucleotide vector constructs used in the gene therapy method are preferably constructs that will not integrate into the host genome nor will they contain sequences that allow for replication. Any strong promoter known to those skilled in the art can be used for driving the expression of DNA. Unlike other gene therapies techniques, one major advantage of introducing naked nucleic acid sequences into target cells is the transitory nature of the polynucleotide synthesis in the cells. Studies have shown that non-replicating DNA sequences can be introduced into cells to provide production of the desired polypeptide for periods of up to six months.

[1248] The polynucleotide construct can be delivered to the interstitial space of tissues within the an animal, including of muscle, skin, brain, lung, liver, spleen, bone marrow, thymus, heart, lymph, blood, bone, cartilage, pancreas, kidney, gall bladder, stomach, intestine, testis, ovary, uterus, rectum, nervous system, eye, gland, and connective tissue. Interstitial space of the tissues comprises the intercellular fluid, mucopolysaccharide matrix among the reticular fibers of organ tissues, elastic fibers in the walls of vessels or chambers, collagen fibers of fibrous tissues, or that same matrix within connective tissue ensheathing muscle cells or in the lacunae of bone. It is similarly the space occupied by the plasma of the circulation and the lymph fluid of the lymphatic channels. Delivery to the interstitial space of muscle tissue is preferred for the reasons discussed below. They may be conveniently delivered by injection into the tissues comprising these cells. They are preferably delivered to and expressed in persistent, non-dividing cells which are differentiated, although delivery and expression may be achieved in non-differentiated or less completely differentiated cells, such as, for example, stem cells of blood or skin fibroblasts. In vivo muscle cells are particularly competent in their ability to take up and express polynucleotides.

[1249] For the naked polynucleotide injection, an effective dosage amount of DNA or RNA will be in the range of from about 0.05 g/kg body weight to about 50 mg/kg body weight. Preferably the dosage will be from about 0.005 mg/kg to about 20 mg/kg and more preferably from about 0.05 mg/kg to about 5 mg/kg. Of course, as the artisan of ordinary skill will appreciate, this dosage will vary according to the tissue site of injection. The appropriate and effective dosage of nucleic acid sequence can readily be determined by those of ordinary skill in the art and may depend on the condition being treated and the route of administration. The preferred route of administration is by the parenteral route of injection into the interstitial space of tissues. However, other parenteral routes may also be used, such as, inhalation of an aerosol formulation particularly for delivery to lungs or bronchial tissues, throat or mucous membranes of the nose. In addition, naked polynucleotide constructs can be delivered to arteries during angioplasty by the catheter used in the procedure.

[1250] The dose response effects of injected polynucleotide in muscle in vivo is determined as follows. Suitable template DNA for production of mRNA coding for polypeptide of the present invention is prepared in accordance with a standard recombinant DNA methodology. The template DNA, which may be either circular or linear, is either used as naked DNA or complexed with liposomes. The quadriceps muscles of mice are then injected with various amounts of the template DNA.

[1251] Five to six week old female and male Balb/C mice are anesthetized by intraperitoneal injection with 0.3 ml of 2.5% Avertin. A 1.5 cm incision is made on the anterior thigh, and the quadriceps muscle is directly visualized. The template DNA is injected in 0.1 ml of carrier in a 1 cc syringe through a 27 gauge needle over one minute, approximately 0.5 cm from the distal insertion site of the muscle into the knee and about 0.2 cm deep. A suture is placed over the injection site for future localization, and the skin is closed with stainless steel clips.

[1252] After an appropriate incubation time (e.g., 7 days) muscle extracts are prepared by excising the entire quadriceps. Every fifth 15 um cross-section of the individual quadriceps muscles is histochemically stained for protein expression. A time course for protein expression may be done in a similar fashion except that quadriceps from different mice are harvested at different times. Persistence of DNA in muscle following injection may be determined by Southern blot analysis after preparing total cellular DNA and HIRT supernatants from injected and control mice. The results of the above experimentation in mice can be use to extrapolate proper dosages and other treatment parameters in humans and other animals using naked DNA.

### Example 29

### Transgenic Animals

[1253] The polypeptides of the invention can also be expressed in transgenic animals. Animals of any species, including, but not limited to, mice, rats, rabbits, hamsters, guinea pigs, pigs, micro-pigs, goats, sheep, cows and non-human primates, e.g., baboons, monkeys, and chimpanzees may be used to generate transgenic animals. In a specific embodiment, techniques described herein or otherwise known in the art, are used to express polypeptides of the invention in humans, as part of a gene therapy protocol.

[1254] Any technique known in the art may be used to introduce the transgene (i.e., polynucleotides of the invention) into animals to produce the founder lines of transgenic animals. Such techniques include, but are not limited to, pronuclear microinjection (Paterson et al., Appl. Microbiol. Biotechnol. 40:691-698 (1994); Carver et al., Biotechnology (NY) 11:1263-1270 (1993); Wright et al., Biotechnology (NY) 9:830-834 (1991); and Hoppe et al., U.S. Pat. No. 4,873,191 (1989)); retrovirus mediated gene transfer into germ lines (Van der Putten et al., Proc. Natl. Acad. Sci., USA 82:6148-6152 (1985)), blastocysts or embryos; gene targeting in embryonic stem cells (Thompson et al., Cell 56:313-321 (1989)); electroporation of cells or embryos (Lo, 1983, Mol Cell. Biol. 3:1803-1814 (1983)); introduction of the polynucleotides of the invention using a gene gun (see, e.g., Ulmer et al., Science 259:1745 (1993); introducing nucleic acid constructs into embryonic pleuripotent stem cells and transferring the stem cells back into the blastocyst; and sperm-mediated gene transfer (Lavitrano et al., Cell 57:717-723 (1989); etc. For a review of such techniques, see Gordon, “Transgenic Animals,” Intl. Rev. Cytol. 115:171-229 (1989), which is incorporated by reference herein in its entirety.

[1255] Any technique known in the art may be used to produce transgenic clones containing polynucleotides of the invention, for example, nuclear transfer into enucleated oocytes of nuclei from cultured embryonic, fetal, or adult cells induced to quiescence (Campell et al., Nature 380:64-66 (1996); Wilmut et al., Nature 385:810-813 (1997)).

[1256] The present invention provides for transgenic animals that carry the transgene in all their cells, as well as animals which carry the transgene in some, but not all their cells, i.e., mosaic animals or chimeric. The transgene may be integrated as a single transgene or as multiple copies such as in concatamers, e.g., head-to-head tandems or head-to-tail tandems. The transgene may also be selectively introduced into and activated in a particular cell type by following, for example, the teaching of Lasko et al. (Lasko et al., Proc. Natl. Acad. Sci. USA 89:6232-6236 (1992)). The regulatory sequences required for such a cell-type specific activation will depend upon the particular cell type of interest, and will be apparent to those of skill in the art. When it is desired that the polynucleotide transgene be integrated into the chromosomal site of the endogenous gene, gene targeting is preferred. Briefly, when such a technique is to be utilized, vectors containing some nucleotide sequences homologous to the endogenous gene are designed for the purpose of integrating, via homologous recombination with chromosomal sequences, into and disrupting the function of the nucleotide sequence of the endogenous gene. The transgene may also be selectively introduced into a particular cell type, thus inactivating the endogenous gene in only that cell type, by following, for example, the teaching of Gu et al. (Gu et al., Science 265:103-106 (1994)). The regulatory sequences required for such a cell-type specific inactivation will depend upon the particular cell type of interest, and will be apparent to those of skill in the art.

[1257] Once transgenic animals have been generated, the expression of the recombinant gene may be assayed utilizing standard techniques. Initial screening may be accomplished by Southern blot analysis or PCR techniques to analyze animal tissues to verify that integration of the transgene has taken place. The level of mRNA expression of the transgene in the tissues of the transgenic animals may also be assessed using techniques which include, but are not limited to, Northern blot analysis of tissue samples obtained from the animal, in situ hybridization analysis, and reverse transcriptase-PCR (rt-PCR). Samples of transgenic gene-expressing tissue may also be evaluated immunocytochemically or immunohistochemically using antibodies specific for the transgene product.

[1258] Once the founder animals are produced, they may be bred, inbred, outbred, or crossbred to produce colonies of the particular animal. Examples of such breeding strategies include, but are not limited to: outbreeding of founder animals with more than one integration site in order to establish separate lines; inbreeding of separate lines in order to produce compound transgenics that express the transgene at higher levels because of the effects of additive expression of each transgene; crossing of heterozygous transgenic animals to produce animals homozygous for a given integration site in order to both augment expression and eliminate the need for screening of animals by DNA analysis; crossing of separate homozygous lines to produce compound heterozygous or homozygous lines; and breeding to place the transgene on a distinct background that is appropriate for an experimental model of interest.

[1259] Transgenic animals of the invention have uses which include, but are not limited to, animal model systems useful in elaborating the biological function of polypeptides of the present invention, studying diseases, disorders, and/or conditions associated with aberrant expression, and in screening for compounds effective in ameliorating such diseases, disorders, and/or conditions.

### Example 30

### Knock-Out Animals

[1260] Endogenous gene expression can also be reduced by inactivating or “knocking out” the gene and/or its promoter using targeted homologous recombination. (E.g., see Smithies et al., Nature 317:230-234 (1985); Thomas & Capecchi, Cell 51:503-512 (1987); Thompson et al., Cell 5:313-321 (1989); each of which is incorporated by reference herein in its entirety). For example, a mutant, non-functional polynucleotide of the invention (or a completely unrelated DNA sequence) flanked by DNA homologous to the endogenous polynucleotide sequence (either the coding regions or regulatory regions of the gene) can be used, with or without a selectable marker and/or a negative selectable marker, to transfect cells that express polypeptides of the invention in vivo. In another embodiment, techniques known in the art are used to generate knockouts in cells that contain, but do not express the gene of interest. Insertion of the DNA construct, via targeted homologous recombination, results in inactivation of the targeted gene. Such approaches are particularly suited in research and agricultural fields where modifications to embryonic stem cells can be used to generate animal offspring with an inactive targeted gene (e.g., see Thomas & Capecchi 1987 and Thompson 1989, supra). However this approach can be routinely adapted for use in humans provided the recombinant DNA constructs are directly administered or targeted to the required site in vivo using appropriate viral vectors that will be apparent to those of skill in the art.

[1261] In further embodiments of the invention, cells that are genetically engineered to express the polypeptides of the invention, or alternatively, that are genetically engineered not to express the polypeptides of the invention (e.g., knockouts) are administered to a patient in vivo. Such cells may be obtained from the patient (i.e., animal, including human) or an MHC compatible donor and can include, but are not limited to fibroblasts, bone marrow cells, blood cells (e.g., lymphocytes), adipocytes, muscle cells, endothelial cells etc. The cells are genetically engineered in vitro using recombinant DNA techniques to introduce the coding sequence of polypeptides of the invention into the cells, or alternatively, to disrupt the coding sequence and/or endogenous regulatory sequence associated with the polypeptides of the invention, e.g., by transduction (using viral vectors, and preferably vectors that integrate the transgene into the cell genome) or transfection procedures, including, but not limited to, the use of plasmids, cosmids, YACs, naked DNA, electroporation, liposomes, etc. The coding sequence of the polypeptides of the invention can be placed under the control of a strong constitutive or inducible promoter or promoter/enhancer to achieve expression, and preferably secretion, of the polypeptides of the invention. The engineered cells which express and preferably secrete the polypeptides of the invention can be introduced into the patient systemically, e.g., in the circulation, or intraperitoneally.

[1262] Alternatively, the cells can be incorporated into a matrix and implanted in the body, e.g., genetically engineered fibroblasts can be implanted as part of a skin graft; genetically engineered endothelial cells can be implanted as part of a lymphatic or vascular graft. (See, for example, Anderson et al. U.S. Pat. No. 5,399,349; and Mulligan & Wilson, U.S. Pat. No. 5,460,959 each of which is incorporated by reference herein in its entirety).

[1263] When the cells to be administered are non-autologous or non-MHC compatible cells, they can be administered using well known techniques which prevent the development of a host immune response against the introduced cells. For example, the cells may be introduced in an encapsulated form which, while allowing for an exchange of components with the immediate extracellular environment, does not allow the introduced cells to be recognized by the host immune system.

[1264] Transgenic and “knock-out” animals of the invention have uses which include, but are not limited to, animal model systems useful in elaborating the biological function of polypeptides of the present invention, studying diseases, disorders, and/or conditions associated with aberrant expression, and in screening for compounds effective in ameliorating such diseases, disorders, and/or conditions.

### Example 31

### Production of an Antibody

[1265] Hybridoma Technology

[1266] The antibodies of the present invention can be prepared by a variety of methods. (See, Current Protocols, Chapter 2.) As one example of such methods, cells expressing polypeptide(s) of the invention are administered to an animal to induce the production of sera containing polyclonal antibodies. In a preferred method, a preparation of polypeptide(s) of the invention is prepared and purified to render it substantially free of natural contaminants. Such a preparation is then introduced into an animal in order to produce polyclonal antisera of greater specific activity.

[1267] Monoclonal antibodies specific for polypeptide(s) of the invention are prepared using hybridoma technology. (Kohler et al., Nature 256:495 (1975); Kohler et al., Eur. J. Immunol. 6:511 (1976); Kohler et al., Eur. J. Immunol. 6:292 (1976); Hammerling et al., in: Monoclonal Antibodies and T-Cell Hybridomas, Elsevier, N.Y., pp. 563-681 (1981)). In general, an animal (preferably a mouse) is immunized with polypeptide(s) of the invention, or, more preferably, with a secreted polypeptide-expressing cell. Such polypeptide-expressing cells are cultured in any suitable tissue culture medium, preferably in Earle's modified Eagle's medium supplemented with 10% fetal bovine serum (inactivated at about 56° C.), and supplemented with about 10 g/l of nonessential amino acids, about 1,000 U/ml of penicillin, and about 100 μg/ml of streptomycin.

[1268] The splenocytes of such mice are extracted and fused with a suitable myeloma cell line. Any suitable myeloma cell line may be employed in accordance with the present invention; however, it is preferable to employ the parent myeloma cell line (SP20), available from the ATCC. After fusion, the resulting hybridoma cells are selectively maintained in HAT medium, and then cloned by limiting dilution as described by Wands et al. (Gastroenterology 80:225-232 (1981)). The hybridoma cells obtained through such a selection are then assayed to identify clones which secrete antibodies capable of binding the polypeptide(s) of the invention.

[1269] Alternatively, additional antibodies capable of binding polypeptide(s) of the invention can be produced in a two-step procedure using anti-idiotypic antibodies. Such a method makes use of the fact that antibodies are themselves antigens, and therefore, it is possible to obtain an antibody which binds to a second antibody. In accordance with this method, protein specific antibodies are used to immunize an animal, preferably a mouse. The splenocytes of such an animal are then used to produce hybridoma cells, and the hybridoma cells are screened to identify clones which produce an antibody whose ability to bind to the polypeptide(s) of the invention protein-specific antibody can be blocked by polypeptide(s) of the invention. Such antibodies comprise anti-idiotypic antibodies to the polypeptide(s) of the invention protein-specific antibody and are used to immunize an animal to induce formation of further polypeptide(s) of the invention protein-specific antibodies.

[1270] For in vivo use of antibodies in humans, an antibody is “humanized”. Such antibodies can be produced using genetic constructs derived from hybridoma cells producing the monoclonal antibodies described above. Methods for producing chimeric and humanized antibodies are known in the art and are discussed herein. (See, for review, Morrison, Science 229:1202 (1985); Oi et al., BioTechniques 4:214 (1986); Cabilly et al., U.S. Pat. No. 4,816,567; Taniguchi et al., EP 171496; Morrison et al., EP 173494; Neuberger et al., WO 8601533; Robinson et al., WO 8702671; Boulianne et al., Nature 312:643 (1984); Neuberger et al., Nature 314:268 (1985).)

Isolation of Antibody Fragments Directed Polypeptide(s) of the Invention from A Library of scFvs

[1271] Naturally occurring V-genes isolated from human PBLs are constructed into a library of antibody fragments which contain reactivities against polypeptide(s) of the invention to which the donor may or may not have been exposed (see e.g., U.S. Pat. No. 5,885,793 incorporated herein by reference in its entirety).

[1272] Rescue of the Library. A library of scFvs is constructed from the RNA of human PBLs as described in PCT publication WO 92/01047. To rescue phage displaying antibody fragments, approximately 109 E. coli harboring the phagemid are used to inoculate 50 ml of 2×TY containing 1% glucose and 100 μg/ml of ampicillin (2×TY-AMP-GLU) and grown to an O.D. of 0.8 with shaking. Five ml of this culture is used to innoculate 50 ml of 2×TY-AMP-GLU, 2×108 TU of delta gene 3 helper (M13 delta gene III, see PCT publication WO 92/01047) are added and the culture incubated at 37° C. for 45 minutes without shaking and then at 37° C. for 45 minutes with shaking. The culture is centrifuged at 4000 r.p.m. for 10 min. and the pellet resuspended in 2 liters of 2×TY containing 100 μg/ml ampicillin and 50 ug/ml kanamycin and grown overnight. Phage are prepared as described in PCT publication WO 92/01047.

[1273] M13 delta gene III is prepared as follows: M13 delta gene III helper phage does not encode gene III protein, hence the phage(mid) displaying antibody fragments have a greater avidity of binding to antigen. Infectious M13 delta gene III particles are made by growing the helper phage in cells harboring a pUC 19 derivative supplying the wild type gene III protein during phage morphogenesis. The culture is incubated for 1 hour at 37° C. without shaking and then for a further hour at 37° C. with shaking. Cells are spun down (IEC-Centra 8, 400 r.p.m. for 10 min), resuspended in 300 ml 2×TY broth containing 100 μg ampicillin/ml and 25 μg kanamycin/ml (2×TY-AMP-KAN) and grown overnight, shaking at 37° C. Phage particles are purified and concentrated from the culture medium by two PEG-precipitations (Sambrook et al., 1990), resuspended in 2 ml PBS and passed through a 0.45 μm filter (Minisart NML; Sartorius) to give a final concentration of approximately 1013 transducing units/ml (ampicillin-resistant clones).

[1274] Panning of the Library. Immunotubes (Nunc) are coated overnight in PBS with 4 ml of either 100 μg/ml or 10 μg/ml of a polypeptide of the present invention. Tubes are blocked with 2% Marvel-PBS for 2 hours at 37° C. and then washed 3 times in PBS. Approximately 1013 TU of phage is applied to the tube and incubated for 30 minutes at room temperature tumbling on an over and under turntable and then left to stand for another 1.5 hours. Tubes are washed 10 times with PBS 0.1% Tween-20 and 10 times with PBS. Phage are eluted by adding 1 ml of 100 mM triethylamine and rotating 15 minutes on an under and over turntable after which the solution is immediately neutralized with 0.5 ml of 1.0M Tris-HCl, pH 7.4. Phage are then used to infect 10 ml of mid-log E. coli TG1 by incubating eluted phage with bacteria for 30 minutes at 37° C. The E. coli are then plated on TYE plates containing 1% glucose and 100 μg/ml ampicillin. The resulting bacterial library is then rescued with delta gene 3 helper phage as described above to prepare phage for a subsequent round of selection. This process is then repeated for a total of 4 rounds of affinity purification with tube-washing increased to 20 times with PBS, 0.1% Tween-20 and 20 times with PBS for rounds 3 and 4.

[1275] Characterization of Binders. Eluted phage from the 3rd and 4th rounds of selection are used to infect E. coli HB 2151 and soluble scFv is produced (Marks, et al., 1991) from single colonies for assay. ELISAs are performed with microtitre plates coated with either 10 pg/ml of the polypeptide of the present invention in 50 mM bicarbonate pH 9.6. Clones positive in ELISA are further characterized by PCR fingerprinting (see, e.g., PCT publication WO 92/01047) and then by sequencing. These ELISA positive clones may also be further characterized by techniques known in the art, such as, for example, epitope mapping, binding affinity, receptor signal transduction, ability to block or competitively inhibit antibody/antigen binding, and competitive agonistic or antagonistic activity.

### Example 32

### Assays Detecting Stimulation or Inhibition of B cell Proliferation and Differentiation

[1276] Generation of functional humoral immune responses requires both soluble and cognate signaling between B-lineage cells and their microenvironment. Signals may impart a positive stimulus that allows a B-lineage cell to continue its programmed development, or a negative stimulus that instructs the cell to arrest its current developmental pathway. To date, numerous stimulatory and inhibitory signals have been found to influence B cell responsiveness including IL-2, IL-4, IL-5, IL-6, IL-7, IL10, IL-13, IL-14 and IL-15. Interestingly, these signals are by themselves weak effectors but can, in combination with various co-stimulatory proteins, induce activation, proliferation, differentiation, homing, tolerance and death among B cell populations.

[1277] One of the best studied classes of B-cell co-stimulatory proteins is the TNF-superfamily. Within this family CD40, CD27, and CD30 along with their respective ligands CD154, CD70, and CD153 have been found to regulate a variety of immune responses. Assays which allow for the detection and/or observation of the proliferation and differentiation of these B-cell populations and their precursors are valuable tools in determining the effects various proteins may have on these B-cell populations in terms of proliferation and differentiation. Listed below are two assays designed to allow for the detection of the differentiation, proliferation, or inhibition of B-cell populations and their precursors.

[1278] In Vitro Assay—Purified polypeptides of the invention, or truncated forms thereof, is assessed for its ability to induce activation, proliferation, differentiation or inhibition and/or death in B-cell populations and their precursors. The activity of the polypeptides of the invention on purified human tonsillar B cells, measured qualitatively over the dose range from 0.1 to 10,000 ng/mL, is assessed in a standard B-lymphocyte co-stimulation assay in which purified tonsillar B cells are cultured in the presence of either formalin-fixed Staphylococcus aureus Cowan I (SAC) or immobilized anti-human IgM antibody as the priming agent. Second signals such as IL-2 and IL-15 synergize with SAC and IgM crosslinking to elicit B cell proliferation as measured by tritiated-thymidine incorporation. Novel synergizing agents can be readily identified using this assay. The assay involves isolating human tonsillar B cells by magnetic bead (MACS) depletion of CD3-positive cells. The resulting cell population is greater than 95% B cells as assessed by expression of CD45R(B220).

[1279] Various dilutions of each sample are placed into individual wells of a 96-well plate to which are added 10⁵ B-cells suspended in culture medium (RPMI 1640 containing 10% FBS, 5×10⁻⁵M 2ME, 100 U/ml penicillin, 10 ug/ml streptomycin, and 10⁻⁵ dilution of SAC) in a total volume of 150 ul. Proliferation or inhibition is quantitated by a 20 h pulse (1 uCi/well) with 3H-thymidine (6.7 Ci/mM) beginning 72 h post factor addition. The positive and negative controls are IL2 and medium respectively.

[1280] In Vivo Assay—BALB/c mice are injected (i.p.) twice per day with buffer only, or 2 mg/Kg of a polypeptide of the invention, or truncated forms thereof. Mice receive this treatment for 4 consecutive days, at which time they are sacrificed and various tissues and serum collected for analyses. Comparison of H&E sections from normal spleens and spleens treated with polypeptides of the invention identify the results of the activity of the polypeptides on spleen cells, such as the diffusion of peri-arterial lymphatic sheaths, and/or significant increases in the nucleated cellularity of the red pulp regions, which may indicate the activation of the differentiation and proliferation of B-cell populations. Immunohistochemical studies using a B cell marker, anti-CD45R(B220), are used to determine whether any physiological changes to splenic cells, such as splenic disorganization, are due to increased B-cell representation within loosely defined B-cell zones that infiltrate established T-cell regions.

[1281] Flow cytometric analyses of the spleens from mice treated with polypeptide is used to indicate whether the polypeptide specifically increases the proportion of ThB+, CD45R(B220) dull B cells over that which is observed in control mice.

[1282] Likewise, a predicted consequence of increased mature B-cell representation in vivo is a relative increase in serum Ig titers. Accordingly, serum IgM and IgA levels are compared between buffer and polypeptide-treated mice.

[1283] The studies described in this example tested activity of a polypeptide of the invention. However, one skilled in the art could easily modify the exemplified studies to test the activity of polynucleotides of the invention (e.g., gene therapy), agonists, and/or antagonists of polynucleotides or polypeptides of the invention.

### Example 33

### T Cell Proliferation Assay

[1284] Proliferation assay for Resting PBLs.

[1285] A CD3-induced proliferation assay is performed on PBMCs and is measured by the uptake of ³H-thymidine. The assay is performed as follows. Ninety-six well plates are coated with 100 microliters per well of mAb to CD3 (HIT3a, Pharmingen) or isotype-matched control mAb (B33.1) overnight at 4° C. (1 microgram/ml in 0.05M bicarbonate buffer, pH 9.5), then washed three times with PBS. PBMC are isolated by F/H gradient centrifugation from human peripheral blood and added to quadruplicate wells (5×10⁴/well) of mAb coated plates in RPMI containing 10% FCS and P/S in the presence of varying concentrations of TNF Delta and/or TNF Epsilon protein (total volume 200 microliters). Relevant protein buffer and medium alone are controls. After 48 hr. culture at 37° C., plates are spun for 2 min. at 1000 rpm and 100 microliters of supernatant is removed and stored −20° C. for measurement of IL-2 (or other cytokines) if effect on proliferation is observed. Wells are supplemented with 100 microliters of medium containing 0.5 microcuries of ³H-thymidine and cultured at 37° C. for 18-24 hr. Wells are harvested and incorporation of ³H-thymidine used as a measure of proliferation. Anti-CD3 alone is the positive control for proliferation. IL-2 (100 U/ml) is also used as a control which enhances proliferation. Control antibody which does not induce proliferation of T cells is used as the negative controls for the effects of TNF Delta and/or TNF Epsilon proteins.

[1286] Alternatively, a proliferation assay on resting PBL (peripheral blood lymphocytes) is measured by the up-take of ³H-thymidine. The assay is performed as follows. PBMC are isolated by Ficoll (LSM, ICN Biotechnologies, Aurora, Ohio) gradient centrifugation from human peripheral blood, and are cultured overnight in 10% (Fetal Calf Serum, Biofluids, Rockville, Md.)/RPMI (Gibco BRL, Gaithersburg, Md.). This overnight incubation period allows the adherent cells to attach to the plastic, which results in a lower background in the assay as there are fewer cells that can act as antigen presenting cells or that might be producing growth factors. The following day the non-adherent cells are collected, washed and used in the proliferation assay. The assay is performed in a 96 well plate using 2×10⁴ cells/well in a final volume of 200 microliters. The supernatants (e.g., CHO or 293T supernatants) expressing the protein of interest are tested at a 30% final dilution, therefore 60 ul are added to 140 ul of 10% FCS/RPMI containing the cells. Control supernatants are used at the same final dilution and express the following proteins: vector (negative control), IL-2 (*), IFN□, TNF□, IL-10 and TR2. In addition to the control supernatants, recombinant human IL-2 (R & D Systems, Minneapolois, MN) at a final concentration of 100 ng/ml is also used. After 24 hours of culture, each well is pulsed with 1 uCi of ³H-thymidine (Nen, Boston, Mass.). Cells are then harvested 20 hours following pulsing and incorporation of ³H-thymidine is used as a measure of proliferation. Results are expressed as an average of triplicate samples plus or minus standard error.

[1287] (*) The amount of the control cytokines IL-2, IFN□, TNF [symbol] and IL-10 produced in each transfection varies between 300 pg to 5 ng/ml.

[1288] Costimulation Assay.

[1289] A costimulation assay on resting PBL (peripheral blood lymphocytes) is performed in the presence of immobilized antibodies to CD3 and CD28. The use of antibodies specific for the invariant regions of CD3 mimic the induction of T cell activation that would occur through stimulation of the T cell receptor by an antigen. Cross-linking of the TCR (first signal) in the absence of a costimulatory signal (second signal) causes very low induction of proliferation and will eventually result in a state of “anergy”, which is characterized by the absence of growth and inability to produce cytokines. The addition of a costimulatory signal such as an antibody to CD28, which mimics the action of the costimulatory molecule. B7-1 expressed on activated APCs, results in enhancement of T cell responses including cell survival and production of IL-2. Therefore this type of assay allows to detect both positive and negative effects caused by addition of supernatants expressing the proteins of interest on T cell proliferation.

[1290] The assay is performed as follows. Ninety-six well plates are coated with 100 ng/ml anti-CD3 and 5 ug/ml anti-CD28 (Pharmingen, San Diego, Calif.) in a final volume of 100 ul and incubated overnight at 4 C. Plates are washed twice with PBS before use. PBMC are isolated by Ficoll (LSM, ICN Biotechnologies, Aurora, Ohio) gradient centrifugation from human peripheral blood, and are cultured overnight in 10% FCS (Fetal Calf Serum, Biofluids, Rockville, Md.)/RPMI (Gibco BRL, Gaithersburg, Md.). This overnight incubation period allows the adherent cells to attach to the plastic, which results in a lower background in the assay as there are fewer cells that can act as antigen presenting cells or that might be producing growth factors. The following day the non adherent cells are collected, washed and used in the proliferation assay. The assay is performed in a 96 well plate using 2×10⁴ cells/well in a final volume of 200 ul. The supernatants (e.g., CHO or 293T supernatants) expressing the protein of interest are tested at a 30% final dilution, therefore 60 ul are added to 140 ul of 10% FCS/RPMI containing the cells. Control supernatants are used at the same final dilution and express the following proteins: vector only (negative control), IL-2, IFN□, TNF□, IL-10 and TR2. In addition to the control supernatants recombinant human IL-2 (R & D Systems, Minneapolis, Minn.) at a final concentration of 10 ng/ml is also used. After 24 hours of culture, each well is pulsed with 1 uCi of ³H-thymidine (Nen, Boston, Mass.). Cells are then harvested 20 hours following pulsing and incorporation of ³H-thymidine is used as a measure of proliferation. Results are expressed as an average of triplicate samples plus or minus standard error.

[1291] Costimulation Assay: IFN γ and IL-2 ELISA.

[1292] The assay is performed as follows. Twenty-four well plates are coated with either 300 ng/ml or 600 ng/ml anti-CD3 and 5 ug/ml anti-CD28 (Pharmingen, San Diego, Calif.) in a final volume of 500 ul and incubated overnight at 4 C. Plates are washed twice with PBS before use. PBMC are isolated by Ficoll (LSM, ICN Biotechnologies, Aurora, Ohio) gradient centrifugation from human peripheral blood, and are cultured overnight in 10% FCS (Fetal Calf Serum, Biofluids, Rockville, Md.)/RPMI (Gibco BRL, Gaithersburg, Md.). This overnight incubation period allows the adherent cells to attach to the plastic, which results in a lower background in the assay as there are fewer cells that can act as antigen presenting cells or that might be producing growth factors. The following day the non adherent cells are collected, washed and used in the costimulation assay. The assay is performed in the pre-coated twenty-four well plate using 1×10⁵ cells/well in a final volume of 900 ul. The supernatants (293T supernatants) expressing the protein of interest are tested at a 30% final dilution, therefore 300 ul are added to 600 ul of 10% FCS/RPMI containing the cells. Control supernatants are used at the same final dilution and express the following proteins: vector only (negative control), IL-2, IFN□, IL-12 and IL-18. In addition to the control supernatants recombinant human IL-2 (all cytokines were purchased from R & D Systems, Minneapolis, Minn.) at a final concentration of 10 ng/ml, IL-12 at a final concentration of 1 ng/ml and IL-18 at a final concentration of 50 ng/ml are also used. Controls and unknown samples are tested in duplicate. Supernatant samples (250 ul) are collected 2 days and 5 days after the beginning of the assay. ELISAs to test for IFN□ and IL-2 secretion are performed using kits purchased from R & D Systems, (Minneapolis, Minn.). Results are expressed as an average of duplicate samples plus or minus standard error.

[1293] Proliferation Assay for Preactivated-Resting T Cells.

[1294] A proliferation assay on preactivated-resting T cells is performed on cells that are previously activated with the lectin phytohemagglutinin (PHA). Lectins are polymeric plant proteins that can bind to residues on T cell surface glycoproteins including the TCR and act as polyclonal activators. PBLs treated with PHA and then cultured in the presence of low doses of IL-2 resemble effector T cells. These cells are generally more sensitive to further activation induced by growth factors such as IL-2. This is due to the expression of high affinity IL-2 receptors that allows this population to respond to amounts of IL-2 that are 100 fold lower than what would have an effect on a naive T cell. Therefore the use of this type of cells might enable to detect the effect of very low doses of an unknown growth factor, that would not be sufficient to induce proliferation on resting (naïve) T cells.

[1295] The assay is performed as follows. PBMC are isolated by F/H gradient centrifugation from human peripheral blood, and are cultured in lo % FCS (Fetal Calf Serum, Biofluids, Rockville, Md.)/RPMI (Gibco BRL, Gaithersburg, Md.) in the presence of 2 ug/ml PHA (Sigma, Saint Louis, Mo.) for three days. The cells are then washed in PBS and cultured inl 0% FCS/RPMI in the presence of 5 ng/ml of human recombinant IL-2 (R & D Systems, Minneapolis, Minn.) for 3 days. The cells are washed and rested in starvation medium (1% FCS/RPMI) forl6 hours prior to the beginning of the proliferation assay. An aliquot of the cells is analyzed by FACS to determine the percentage of T cells (CD3 positive cells) present; this usually ranges between 93-97% depending on the donor. The assay is performed in a 96 well plate using 2×10⁴ cells/well in a final volume of 200 ul. The supernatants (e.g., CHO or 293T supernatants) expressing the protein of interest are tested at a 30% final dilution, therefore 60 ul are added to 140 ul of inlo % FCS/RPMI containing the cells. Control supernatants are used at the same final dilution and express the following proteins: vector (negative control), IL-2, IFN□, TNF□, IL-10 and TR2. In addition to the control supernatants recombinant human IL-2 at a final concentration of 10 ng/ml is also used. After 24 hours of culture, each well is pulsed with 1 uCi of ³H-thymidine (Nen, Boston, Mass.). Cells are then harvested 20 hours following pulsing and incorporation of ³H-thymidine is used as a measure of proliferation. Results are expressed as an average of triplicate samples plus or minus standard error.

[1296] The studies described in this example test activity of polypeptides of the invention. However, one skilled in the art could easily modify the exemplified studies to test the activity of polynucleotides of the invention (e.g., gene therapy), agonists, and/or antagonists of polynucleotides or polypeptides of the invention.

### Example 34

### Effect of Polypeptides of the Invention on the Expression of MHC Class II, Costimulatory and Adhesion Molecules and Cell Differentiation of Monocytes and Monocyte-Derived Human Dendritic Cells

[1297] Dendritic cells are generated by the expansion of proliferating precursors found in the peripheral blood: adherent PBMC or elutriated monocytic fractions are cultured for 7-10 days with GM-CSF (50 ng/ml) and IL-4 (20 ng/ml). These dendritic cells have the characteristic phenotype of immature cells (expression of CD1, CD80, CD86, CD40 and MHC class II antigens). Treatment with activating factors, such as TNF-α, causes a rapid change in surface phenotype (increased expression of MHC class I and II, costimulatory and adhesion molecules, downregulation of FCγ RII, upregulation of CD83). These changes correlate with increased antigen-presenting capacity and with functional maturation of the dendritic cells.

[1298] FACS analysis of surface antigens is performed as follows. Cells are treated 1-3 days with increasing concentrations of polypeptides of the invention or LPS (positive control), washed with PBS containing 1% BSA and 0.02 mM sodium azide, and then incubated with 1:20 dilution of appropriate FITC- or PE-labeled monoclonal antibodies for 30 minutes at 4 degrees C. After an additional wash, the labeled cells are analyzed by flow cytometry on a FACScan (Becton Dickinson).

[1299] Effect on the production of cytokines. Cytokines generated by dendritic cells, in particular IL-12, are important in the initiation of T-cell dependent immune responses. IL-12 strongly influences the development of Th1 helper T-cell immune response, and induces cytotoxic T and NK cell function. An ELISA is used to measure the IL-12 release as follows. Dendritic cells (10⁶/ml) are treated with increasing concentrations of polypeptides of the invention for 24 hours. LPS (100 ng/ml) is added to the cell culture as positive control. Supernatants from the cell cultures are then collected and analyzed for IL-12 content using commercial ELISA kit (e.g, R & D Systems (Minneapolis, Minn.)). The standard protocols provided with the kits are used.

[1300] Effect on the expression of MHC Class II, costimulatory and adhesion molecules. Three major families of cell surface antigens can be identified on monocytes: adhesion molecules, molecules involved in antigen presentation, and Fc receptor. Modulation of the expression of MHC class II antigens and other costimulatory molecules, such as B7 and ICAM-1, may result in changes in the antigen presenting capacity of monocytes and ability to induce T cell activation. Increase expression of Fc receptors may correlate with improved monocyte cytotoxic activity, cytokine release and phagocytosis.

[1301] FACS analysis is used to examine the surface antigens as follows. Monocytes are treated 1-5 days with increasing concentrations of polypeptides of the invention or LPS (positive control), washed with PBS containing 1% BSA and 0.02 mM sodium azide, and then incubated with 1:20 dilution of appropriate FITC— or PE-labeled monoclonal antibodies for 30 minutes at 4 degreesC. After an additional wash, the labeled cells are analyzed by flow cytometry on a FACScan (Becton Dickinson).

[1302] Monocyte activation and/or increased survival. Assays for molecules that activate (or alternatively, inactivate) monocytes and/or increase monocyte survival (or alternatively, decrease monocyte survival) are known in the art and may routinely be applied to determine whether a molecule of the invention functions as an inhibitor or activator of monocytes. Polypeptides, agonists, or antagonists of the invention can be screened using the three assays described below. For each of these assays, Peripheral blood mononuclear cells (PBMC) are purified from single donor leukopacks (American Red Cross, Baltimore, Md.) by centrifugation through a Histopaque gradient (Sigma). Monocytes are isolated from PBMC by counterflow centrifugal elutriation.

[1303] Monocyte Survival Assay. Human peripheral blood monocytes progressively lose viability when cultured in absence of serum or other stimuli. Their death results from internally regulated process (apoptosis). Addition to the culture of activating factors, such as TNF-alpha dramatically improves cell survival and prevents DNA fragmentation. Propidium iodide (PI) staining is used to measure apoptosis as follows. Monocytes are cultured for 48 hours in polypropylene tubes in serum-free medium (positive control), in the presence of 100 ng/ml TNF-alpha (negative control), and in the presence of varying concentrations of the compound to be tested. Cells are suspended at a concentration of 2×10⁶/ml in PBS containing PI at a final concentration of 5 μg/ml, and then incubaed at room temperature for 5 minutes before FACScan analysis. PI uptake has been demonstrated to correlate with DNA fragmentation in this experimental paradigm.

[1304] Effect on cytokine release. An important function of monocytes/macrophages is their regulatory activity on other cellular populations of the immune system through the release of cytokines after stimulation. An ELISA to measure cytokine release is performed as follows. Human monocytes are incubated at a density of 5×10⁵ cells/ml with increasing concentrations of the a polypeptide of the invention and under the same conditions, but in the absence of the polypeptide. For IL-12 production, the cells are primed overnight with IFN (100 U/ml) in presence of a polypeptide of the invention. LPS (10 ng/ml) is then added. Conditioned media are collected after 24 h and kept frozen until use. Measurement of TNF-alpha, IL-10, MCP-1 and IL-8 is then performed using a commercially available ELISA kit (e.g, R & D Systems (Minneapolis, Minn.)) and applying the standard protocols provided with the kit.

[1305] Oxidative burst. Purified monocytes are plated in 96-w plate at 2-1×10⁵ cell/well. Increasing concentrations of polypeptides of the invention are added to the wells in a total volume of 0.2 ml culture medium (RPMI 1640+10% FCS, glutamine and antibiotics). After 3 days incubation, the plates are centrifuged and the medium is removed from the wells. To the macrophage monolayers, 0.2 ml per well of phenol red solution (140 mM NaCl, 10 mM potassium phosphate buffer pH 7.0, 5.5 mM dextrose, 0.56 mM phenol red and 19 U/ml of HRPO) is added, together with the stimulant (200 nM PMA). The plates are incubated at 37° C. for 2 hours and the reaction is stopped by adding 20 μl 1N NaOH per well. The absorbance is read at 610 nm. To calculate the amount of H₂O₂ produced by the macrophages, a standard curve of a H₂O₂ solution of known molarity is performed for each experiment.

[1306] The studies described in this example tested activity of a polypeptide of the invention. However, one skilled in the art could easily modify the exemplified studies to test the activity of polypeptides, polynucleotides (e.g., gene therapy), agonists, and/or antagonists of the invention.

### Example 35

### Biological Effects of Polypeptides of the Invention

[1307] Astrocyte and Neuronal Assays

[1308] Recombinant polypeptides of the invention, expressed in Escherichia coli and purified as described above, can be tested for activity in promoting the survival, neurite outgrowth, or phenotypic differentiation of cortical neuronal cells and for inducing the proliferation of glial fibrillary acidic protein immunopositive cells, astrocytes. The selection of cortical cells for the bioassay is based on the prevalent expression of FGF-1 and FGF-2 in cortical structures and on the previously reported enhancement of cortical neuronal survival resulting from FGF-2 treatment. A thymidine incorporation assay, for example, can be used to elucidate a polypeptide of the invention's activity on these cells.

[1309] Moreover, previous reports describing the biological effects of FGF-2 (basic FGF) on cortical or hippocampal neurons in vitro have demonstrated increases in both neuron survival and neurite outgrowth (Walicke et al., “Fibroblast growth factor promotes survival of dissociated hippocampal neurons and enhances neurite extension.” Proc. Natl. Acad. Sci. USA 83:3012-3016. (1986), assay herein incorporated by reference in its entirety). However, reports from experiments done on PC-12 cells suggest that these two responses are not necessarily synonymous and may depend on not only which FGF is being tested but also on which receptor(s) are expressed on the target cells. Using the primary cortical neuronal culture paradigm, the ability of a polypeptide of the invention to induce neurite outgrowth can be compared to the response achieved with FGF-2 using, for example, a thymidine incorporation assay.

[1310] Fibroblast and Endothelial Cell Assays

[1311] Human lung fibroblasts are obtained from Clonetics (San Diego, Calif.) and maintained in growth media from Clonetics. Dermal microvascular endothelial cells are obtained from Cell Applications (San Diego, Calif.). For proliferation assays, the human lung fibroblasts and dermal microvascular endothelial cells can be cultured at 5,000 cells/well in a 96-well plate for one day in growth medium. The cells are then incubated for one day in 0.1% BSA basal medium. After replacing the medium with fresh 0.1% BSA medium, the cells are incubated with the test proteins for 3 days. Alamar Blue (Alamar Biosciences, Sacramento, Calif.) is added to each well to a final concentration of 10%. The cells are incubated for 4 hr. Cell viability is measured by reading in a CytoFluor fluorescence reader. For the PGE₂ assays, the human lung fibroblasts are cultured at 5,000 cells/well in a 96-well plate for one day. After a medium change to 0.1% BSA basal medium, the cells are incubated with FGF-2 or polypeptides of the invention with or without IL-1α for 24 hours. The supernatants are collected and assayed for PGE₂ by EIA kit (Cayman, Ann Arbor, Mich.). For the IL-6 assays, the human lung fibroblasts are cultured at 5,000 cells/well in a 96-well plate for one day. After a medium change to 0.1% BSA basal medium, the cells are incubated with FGF-2 or with or without polypeptides of the invention IL-1α for 24 hours. The supernatants are collected and assayed for IL-6 by ELISA kit (Endogen, Cambridge, Mass.).

[1312] Human lung fibroblasts are cultured with FGF-2 or polypeptides of the invention for 3 days in basal medium before the addition of Alamar Blue to assess effects on growth of the fibroblasts. FGF-2 should show a stimulation at 10-2500 ng/ml which can be used to compare stimulation with polypeptides of the invention.

[1313] Parkinson Models.

[1314] The loss of motor function in Parkinson's disease is attributed to a deficiency of striatal dopamine resulting from the degeneration of the nigrostriatal dopaminergic projection neurons. An animal model for Parkinson's that has been extensively characterized involves the systemic administration of 1-methyl-4phenyl1,2,3,6-tetrahydropyridine (MPTP). In the CNS, MPTP is taken-up by astrocytes and catabolized by monoamine oxidase B to 1-methyl-4-phenyl pyridine (MPP⁺) and released. Subsequently, MPP⁺ is actively accumulated in dopaminergic neurons by the high-affinity reuptake transporter for dopamine. MPP⁺ is then concentrated in mitochondria by the electrochemical gradient and selectively inhibits nicotidamide adenine disphosphate: ubiquinone oxidoreductionase (complex I), thereby interfering with electron transport and eventually generating oxygen radicals.

[1315] It has been demonstrated in tissue culture paradigms that FGF-2 (basic FGF) has trophic activity towards nigral dopaminergic neurons (Ferrari et al., Dev. Biol. 1989). Recently, Dr. Unsicker's group has demonstrated that administering FGF-2 in gel foam implants in the striatum results in the near complete protection of nigral dopaminergic neurons from the toxicity associated with MPTP exposure (Otto and Unsicker, J. Neuroscience, 1990).

[1316] Based on the data with FGF-2, polypeptides of the invention can be evaluated to determine whether it has an action similar to that of FGF-2 in enhancing dopaminergic neuronal survival in vitro and it can also be tested in vivo for protection of dopaminergic neurons in the striatum from the damage associated with MPTP treatment. The potential effect of a polypeptide of the invention is first examined in vitro in a dopaminergic neuronal cell culture paradigm. The cultures are prepared by dissecting the midbrain floor plate from gestation day 14 Wistar rat embryos. The tissue is dissociated with trypsin and seeded at a density of 200,000 cells/cm² on polyorthinine-laminin coated glass coverslips. The cells are maintained in Dulbecco's Modified Eagle's medium and F12 medium containing hormonal supplements (N1). The cultures are fixed with paraformaldehyde after 8 days in vitro and are processed for tyrosine hydroxylase, a specific marker for dopminergic neurons, immunohistochemical staining. Dissociated cell cultures are prepared from embryonic rats. The culture medium is changed every third day and the factors are also added at that time.

[1317] Since the dopaminergic neurons are isolated from animals at gestation day 14, a developmental time which is past the stage when the dopaminergic precursor cells are proliferating, an increase in the number of tyrosine hydroxylase immunopositive neurons would represent an increase in the number of dopaminergic neurons surviving in vitro. Therefore, if a polypeptide of the invention acts to prolong the survival of dopaminergic neurons, it would suggest that the polypeptide may be involved in Parkinson's Disease.

[1318] The studies described in this example tested activity of a polypeptide of the invention. However, one skilled in the art could easily modify the exemplified studies to test the activity of polynucleotides (e.g., gene therapy), agonists, and/or antagonists of the invention.

### Example 36

### The Effect of Polypeptides of the Invention on the Growth of Vascular Endothelial Cells

[1319] On day 1, human umbilical vein endothelial cells (HUVEC) are seeded at 2-5×10⁴ cells/35 mm dish density in M199 medium containing 4% fetal bovine serum (FBS), 16 units/ml heparin, and 50 units/ml endothelial cell growth supplements (ECGS, Biotechnique, Inc.). On day 2, the medium is replaced with M199 containing 10% FBS, 8 units/ml heparin. A polypeptide having the amino acid sequence of SEQ ID NO:Y, and positive controls, such as VEGF and basic FGF (bFGF) are added, at varying concentrations. On days 4 and 6, the medium is replaced. On day 8, cell number is determined with a Coulter Counter.

[1320] An increase in the number of HUVEC cells indicates that the polypeptide of the invention may proliferate vascular endothelial cells.

[1321] The studies described in this example tested activity of a polypeptide of the invention. However, one skilled in the art could easily modify the exemplified studies to test the activity of polynucleotides (e.g., gene therapy), agonists, and/or antagonists of the invention.

### Example 37

### Stimulatory Effect of Polypeptides of the Invention on the Proliferation of Vascular Endothelial Cells

[1322] For evaluation of mitogenic activity of growth factors, the colorimetric MTS (3-(4,5-dimethylthiazol-2-yl)-5-(3-carboxymethoxyphenyl)-2-(4-sulfophenyl)₂H-tetrazolium) assay with the electron coupling reagent PMS (phenazine methosulfate) was performed (CellTiter 96 AQ, Promega). Cells are seeded in a 96-well plate (5,000 cells/well) in 0.1 mL serum-supplemented medium and are allowed to attach overnight. After serum-starvation for 12 hours in 0.5% FBS, conditions (bFGF, VEGF₁₆₅ or a polypeptide of the invention in 0.5% FBS) with or without Heparin (8 U/ml) are added to wells for 48 hours. 20 mg of MTS/PMS mixture (1:0.05) are added per well and allowed to incubate for 1 hour at 37° C. before measuring the absorbance at 490 nm in an ELISA plate reader. Background absorbance from control wells (some media, no cells) is subtracted, and seven wells are performed in parallel for each condition. See, Leak et al. In Vitro Cell. Dev. Biol. 30A:512-518 (1994).

[1323] The studies described in this example tested activity of a polypeptide of the invention. However, one skilled in the art could easily modify the exemplified studies to test the activity of polynucleotides (e.g., gene therapy), agonists, and/or antagonists of the invention.

### Example 38

### Inhibition of PDGF-induced Vascular Smooth Muscle Cell Proliferation Stimulatory Effect

[1324] HAoSMC proliferation can be measured, for example, by BrdUrd incorporation. Briefly, subconfluent, quiescent cells grown on the 4-chamber slides are transfected with CRP or FITC-labeled AT2-3LP. Then, the cells are pulsed with 10% calf serum and 6 mg/ml BrdUrd. After 24 h, immunocytochemistry is performed by using BrdUrd Staining Kit (Zymed Laboratories). In brief, the cells are incubated with the biotinylated mouse anti-BrdUrd antibody at 4 degrees C. for 2 h after being exposed to denaturing solution and then incubated with the streptavidin-peroxidase and diaminobenzidine. After counterstaining with hematoxylin, the cells are mounted for microscopic examination, and the BrdUrd-positive cells are counted. The BrdUrd index is calculated as a percent of the BrdUrd-positive cells to the total cell number. In addition, the simultaneous detection of the BrdUrd staining (nucleus) and the FITC uptake (cytoplasm) is performed for individual cells by the concomitant use of bright field illumination and dark field-UV fluorescent illumination. See, Hayashida et al., J. Biol. Chem. 6:271(36):21985-21992 (1996).

[1325] The studies described in this example tested activity of a polypeptide of the invention. However, one skilled in the art could easily modify the exemplified studies to test the activity of polynucleotides (e.g., gene therapy), agonists, and/or antagonists of the invention.

### Example 39

### Stimulation of Endothelial Migration

[1326] This example will be used to explore the possibility that a polypeptide of the invention may stimulate lymphatic endothelial cell migration.

[1327] Endothelial cell migration assays are performed using a 48 well microchemotaxis chamber (Neuroprobe Inc., Cabin John, MD; Falk, W., et al., J. Immunological Methods 1980; 33:239-247). Polyvinylpyrrolidone-free polycarbonate filters with a pore size of 8 um (Nucleopore Corp. Cambridge, Mass.) are coated with 0.1% gelatin for at least 6 hours at room temperature and dried under sterile air. Test substances are diluted to appropriate concentrations in M199 supplemented with 0.25% bovine serum albumin (BSA), and 25 ul of the final dilution is placed in the lower chamber of the modified Boyden apparatus. Subconfluent, early passage (2-6) HUVEC or BMEC cultures are washed and trypsinized for the minimum time required to achieve cell detachment. After placing the filter between lower and upper chamber, 2.5×10⁵ cells suspended in 50 ul M199 containing 1% FBS are seeded in the upper compartment. The apparatus is then incubated for 5 hours at 37° C. in a humidified chamber with 5% CO₂ to allow cell migration. After the incubation period, the filter is removed and the upper side of the filter with the non-migrated cells is scraped with a rubber policeman. The filters are fixed with methanol and stained with a Giemsa solution (Diff-Quick, Baxter, McGraw Park, Ill.). Migration is quantified by counting cells of three random high-power fields (40×) in each well, and all groups are performed in quadruplicate.

[1328] The studies described in this example tested activity of a polypeptide of the invention. However, one skilled in the art could easily modify the exemplified studies to test the activity of polynucleotides (e.g., gene therapy), agonists, and/or antagonists of the invention.

### Example 40

### Stimulation of Nitric Oxide Production by Endothelial Cells

[1329] Nitric oxide released by the vascular endothelium is believed to be a mediator of vascular endothelium relaxation. Thus, activity of a polypeptide of the invention can be assayed by determining nitric oxide production by endothelial cells in response to the polypeptide.

[1330] Nitric oxide is measured in 96-well plates of confluent microvascular endothelial cells after 24 hours starvation and a subsequent 4 hr exposure to various levels of a positive control (such as VEGF-1) and the polypeptide of the invention. Nitric oxide in the medium is determined by use of the Griess reagent to measure total nitrite after reduction of nitric oxide-derived nitrate by nitrate reductase. The effect of the polypeptide of the invention on nitric oxide release is examined on HUVEC.

[1331] Briefly, NO release from cultured HUVEC monolayer is measured with a NO-specific polarographic electrode connected to a NO meter (Iso-NO, World Precision Instruments Inc.) (1049). Calibration of the NO elements is performed according to the following equation:
2KNO₂+2KI+2H₂SO₄62NO+I₂+2H₂O+2K₂SO₄

[1332] The standard calibration curve is obtained by adding graded concentrations of KNO₂ (0, 5, 10, 25, 50, 100, 250, and 500 nmol/L) into the calibration solution containing K₁ and H₂SO₄. The specificity of the Iso-NO electrode to NO is previously determined by measurement of NO from authentic NO gas (1050). The culture medium is removed and HUVECs are washed twice with Dulbecco's phosphate buffered saline. The cells are then bathed in 5 ml of filtered Krebs-Henseleit solution in 6-well plates, and the cell plates are kept on a slide warmer (Lab Line Instruments Inc.) To maintain the temperature at 37° C. The NO sensor probe is inserted vertically into the wells, keeping the tip of the electrode 2 mm under the surface of the solution, before addition of the different conditions. S-nitroso acetyl penicillamin (SNAP) is used as a positive control. The amount of released NO is expressed as picomoles per 1×10⁶ endothelial cells. All values reported are means of four to six measurements in each group (number of cell culture wells). See, Leak et al. Biochem. and Biophys. Res. Comm. 217:96-105 (1995).

[1333] The studies described in this example tested activity of polypeptides of the invention. However, one skilled in the art could easily modify the exemplified studies to test the activity of polynucleotides (e.g., gene therapy), agonists, and/or antagonists of the invention.

### Example 41

### Effect of Polypepides of the Invention on Cord Formation in Angiogenesis

[1334] Another step in angiogenesis is cord formation, marked by differentiation of endothelial cells. This bioassay measures the ability of microvascular endothelial cells to form capillary-like structures (hollow structures) when cultured in vitro.

[1335] CADMEC (microvascular endothelial cells) are purchased from Cell Applications, Inc. as proliferating (passage 2) cells and are cultured in Cell Applications' CADMEC Growth Medium and used at passage 5. For the in vitro angiogenesis assay, the wells of a 48-well cell culture plate are coated with Cell Applications' Attachment Factor Medium (200 ml/well) for 30 min. at 37° C. CADMEC are seeded onto the coated wells at 7,500 cells/well and cultured overnight in Growth Medium. The Growth Medium is then replaced with 300 mg Cell Applications' Chord Formation Medium containing control buffer or a polypeptide of the invention (0.1 to 100 ng/ml) and the cells are cultured for an additional 48 hr. The numbers and lengths of the capillary-like chords are quantitated through use of the Boeckeler VIA-170 video image analyzer. All assays are done in triplicate.

[1336] Commercial (R&D) VEGF (50 ng/ml) is used as a positive control. b-esteradiol (1 ng/ml) is used as a negative control. The appropriate buffer (without protein) is also utilized as a control.

[1337] The studies described in this example tested activity of a polypeptide of the invention. However, one skilled in the art could easily modify the exemplified studies to test the activity of polynucleotides (e.g., gene therapy), agonists, and/or antagonists of the invention.

### Example 42

### Angiogenic Effect on Chick Chorioallantoic Membrane

[1338] Chick chorioallantoic membrane (CAM) is a well-established system to examine angiogenesis. Blood vessel formation on CAM is easily visible and quantifiable. The ability of polypeptides of the invention to stimulate angiogenesis in CAM can be examined.

[1339] Fertilized eggs of the White Leghorn chick (Gallus gallus) and the Japanese qual (Coturnix coturnix) are incubated at 37.8° C. and 80% humidity. Differentiated CAM of 16-day-old chick and 13-day-old qual embryos is studied with the following methods.

[1340] On Day 4 of development, a window is made into the egg shell of chick eggs. The embryos are checked for normal development and the eggs sealed with cellotape. They are further incubated until Day 13. Thermanox coverslips (Nunc, Naperville, Ill.) are cut into disks of about 5 mm in diameter. Sterile and salt-free growth factors are dissolved in distilled water and about 3.3 mg/5 ml are pipetted on the disks. After air-drying, the inverted disks are applied on CAM. After 3 days, the specimens are fixed in 3% glutaraldehyde and 2% formaldehyde and rinsed in 0.12 M sodium cacodylate buffer. They are photographed with a stereo microscope [Wild M8] and embedded for semi- and ultrathin sectioning as described above. Controls are performed with carrier disks alone.

[1341] The studies described in this example tested activity of a polypeptide of the invention. However, one skilled in the art could easily modify the exemplified studies to test the activity of polynucleotides (e.g., gene therapy), agonists, and/or antagonists of the invention.

### Example 43

### Angiogenesis Assay Using a Matrigel Implant in Mouse

[1342] In vivo angiogenesis assay of a polypeptide of the invention measures the ability of an existing capillary network to form new vessels in an implanted capsule of murine extracellular matrix material (Matrigel). The protein is mixed with the liquid Matrigel at 4 degree C. and the mixture is then injected subcutaneously in mice where it solidifies. After 7 days, the solid “plug” of Matrigel is removed and examined for the presence of new blood vessels. Matrigel is purchased from Becton Dickinson Labware/Collaborative Biomedical Products.

[1343] When thawed at 4 degree C. the Matrigel material is a liquid. The Matrigel is mixed with a polypeptide of the invention at 150 ng/ml at 4 degrees C. and drawn into cold 3 ml syringes. Female C57B1/6 mice approximately 8 weeks old are injected with the mixture of Matrigel and experimental protein at 2 sites at the midventral aspect of the abdomen (0.5 ml/site). After 7 days, the mice are sacrificed by cervical dislocation, the Matrigel plugs are removed and cleaned (i.e., all clinging membranes and fibrous tissue is removed). Replicate whole plugs are fixed in neutral buffered 10% formaldehyde, embedded in paraffin and used to produce sections for histological examination after staining with Masson's Trichrome. Cross sections from 3 different regions of each plug are processed. Selected sections are stained for the presence of vWF. The positive control for this assay is bovine basic FGF (150 ng/ml). Matrigel alone is used to determine basal levels of angiogenesis.

[1344] The studies described in this example tested activity of a polypeptide of the invention. However, one skilled in the art could easily modify the exemplified studies to test the activity of polynucleotides (e.g., gene therapy), agonists, and/or antagonists of the invention.

### Example 44

### Rescue of Ischemia in Rabbit Lower Limb Model

[1345] To study the in vivo effects of polynucleotides and polypeptides of the invention on ischemia, a rabbit hindlimb ischemia model is created by surgical removal of one femoral arteries as described previously (Takeshita et al., Am J. Pathol 147:1649-1660 (1995)). The excision of the femoral artery results in retrograde propagation of thrombus and occlusion of the external iliac artery. Consequently, blood flow to the ischemic limb is dependent upon collateral vessels originating from the internal iliac artery (Takeshitaet al. Am J. Pathol 147:1649-1660 (1995)). An interval of 10 days is allowed for post-operative recovery of rabbits and development of endogenous collateral vessels. At 10 day post-operatively (day 0), after performing a baseline angiogram, the internal iliac artery of the ischemic limb is transfected with 500 mg naked expression plasmid containing a polynucleotide of the invention by arterial gene transfer technology using a hydrogel-coated balloon catheter as described (Riessen et al. Hum Gene Ther. 4:749-758 (1993); Leclerc et al. J. Clin. Invest. 90: 936-944 (1992)). When a polypeptide of the invention is used in the treatment, a single bolus of 500 mg polypeptide of the invention or control is delivered into the internal iliac artery of the ischemic limb over a period of 1 min. through an infusion catheter. On day 30, various parameters are measured in these rabbits: (a) BP ratio—The blood pressure ratio of systolic pressure of the ischemic limb to that of normal limb; (b) Blood Flow and Flow Reserve—Resting FL: the blood flow during undilated condition and Max FL: the blood flow during fully dilated condition (also an indirect measure of the blood vessel amount) and Flow Reserve is reflected by the ratio of max FL: resting FL; (c) Angiographic Score—This is measured by the angiogram of collateral vessels. A score is determined by the percentage of circles in an overlaying grid that with crossing opacified arteries divided by the total number m the rabbit thigh; (d) Capillary density—The number of collateral capillaries determined in light microscopic sections taken from hindlimbs.

[1346] The studies described in this example tested activity of polynucleotides and polypeptides of the invention. However, one skilled in the art could easily modify the exemplified studies to test the agonists, and/or antagonists of the invention.

### Example 45

### Effect of Polypeptides of the Invention on Vasodilation

[1347] Since dilation of vascular endothelium is important in reducing blood pressure, the ability of polypeptides of the invention to affect the blood pressure in spontaneously hypertensive rats (SHR) is examined. Increasing doses (0, 10, 30, 100, 300, and 900 mg/kg) of the polypeptides of the invention are administered to 13-14 week old spontaneously hypertensive rats (SHR). Data are expressed as the mean+/−SEM. Statistical analysis are performed with a paired t-test and statistical significance is defined as p<0.05 vs. the response to buffer alone.

[1348] The studies described in this example tested activity of a polypeptide of the invention. However, one skilled in the art could easily modify the exemplified studies to test the activity of polynucleotides (e.g., gene therapy), agonists, and/or antagonists of the invention.

### Example 46

### Rat Ischemic Skin Flap Model

[1349] The evaluation parameters include skin blood flow, skin temperature, and factor VIII immunohistochemistry or endothelial alkaline phosphatase reaction. Expression of polypeptides of the invention, during the skin ischemia, is studied using in situ hybridization.

[1350] The study in this model is divided into three parts as follows:
[1351] Ischemic skin
[1352] Ischemic skin wounds
[1353] Normal wounds

[1354] The experimental protocol includes:

[1355] Raising a 3×4 cm, single pedicle full-thickness random skin flap (myocutaneous flap over the lower back of the animal).

[1356] An excisional wounding (4-6 mm in diameter) in the ischemic skin (skin-flap).

[1357] Topical treatment with a polypeptide of the invention of the excisional wounds (day 0, 1, 2, 3, 4 post-wounding) at the following various dosage ranges: 1 mg to 100 mg.

[1358] Harvesting the wound tissues at day 3, 5, 7, 10, 14 and 21 post-wounding for histological, immunohistochemical, and in situ studies.

[1359] The studies described in this example tested activity of a polypeptide of the invention. However, one skilled in the art could easily modify the exemplified studies to test the activity of polynucleotides (e.g., gene therapy), agonists, and/or antagonists of the invention.

### Example 47

### Peripheral Arterial Disease Model

[1360] Angiogenic therapy using a polypeptide of the invention is a novel therapeutic strategy to obtain restoration of blood flow around the ischemia in case of peripheral arterial diseases. The experimental protocol includes:

[1361] One side of the femoral artery is ligated to create ischemic muscle of the hindlimb, the other side of hindlimb serves as a control.

[1362] A polypeptide of the invention, in a dosage range of 20 mg-500 mg, is delivered intravenously and/or intramuscularly 3 times (perhaps more) per week for 2-3 weeks.

[1363] The ischemic muscle tissue is collected after ligation of the femoral artery at 1, 2, and 3 weeks for the analysis of expression of a polypeptide of the invention and histology. Biopsy is also performed on the other side of normal muscle of the contralateral hindlimb.

[1364] The studies described in this example tested activity of a polypeptide of the invention. However, one skilled in the art could easily modify the exemplified studies to test the activity of polynucleotides (e.g., gene therapy), agonists, and/or antagonists of the invention.

### Example 48

### Ischemic Myocardial Disease Model

[1365] A polypeptide of the invention is evaluated as a potent mitogen capable of stimulating the development of collateral vessels, and restructuring new vessels after coronary artery occlusion. Alteration of expression of the polypeptide is investigated in situ. The experimental protocol includes:

[1366] The heart is exposed through a left-side thoracotomy in the rat. Immediately, the left coronary artery is occluded with a thin suture (6-0) and the thorax is closed.

[1367] A polypeptide of the invention, in a dosage range of 20 mg-500 mg, is delivered intravenously and/or intramuscularly 3 times (perhaps more) per week for 2-4 weeks.

[1368] Thirty days after the surgery, the heart is removed and cross-sectioned for morphometric and in situ analyzes.

[1369] The studies described in this example tested activity of a polypeptide of the invention. However, one skilled in the art could easily modify the exemplified studies to test the activity of polynucleotides (e.g., gene therapy), agonists, and/or antagonists of the invention.

### Example 49

### Rat Corneal Wound Healing Model

[1370] This animal model shows the effect of a polypeptide of the invention on neovascularization. The experimental protocol includes:

[1371] Making a 1-1.5 mm long incision from the center of cornea into the stromal layer. Inserting a spatula below the lip of the incision facing the outer corner of the eye. Making a pocket (its base is 1-1.5 mm form the edge of the eye). Positioning a pellet, containing 50 ng-5 ug of a polypeptide of the invention, within the pocket.

[1372] Treatment with a polypeptide of the invention can also be applied topically to the corneal wounds in a dosage range of 20 mg-500 mg (daily treatment for five days).

[1373] The studies described in this example tested activity of a polypeptide of the invention. However, one skilled in the art could easily modify the exemplified studies to test the activity of polynucleotides (e.g., gene therapy), agonists, and/or antagonists of the invention.

### Example 50

### Diabetic Mouse and Glucocorticoid-Impaired Wound Healing Models

Diabetic db+/db+ Mouse Model.

[1374] To demonstrate that a polypeptide of the invention accelerates the healing process, the genetically diabetic mouse model of wound healing is used. The full thickness wound healing model in the db+/db+ mouse is a well characterized, clinically relevant and reproducible model of impaired wound healing. Healing of the diabetic wound is dependent on formation of granulation tissue and re-epithelialization rather than contraction (Gartner, M. H. et al., J. Surg. Res. 52:389 (1992); Greenhalgh, D. G. et al., Am. J. Pathol. 136:1235 (1990)).

[1375] The diabetic animals have many of the characteristic features observed in Type II diabetes mellitus. Homozygous (db+/db+) mice are obese in comparison to their normal heterozygous (db+/+m) littermates. Mutant diabetic (db+/db+) mice have a single autosomal recessive mutation on chromosome 4 (db+) (Coleman et al. Proc. Natl. Acad. Sci. USA 77:283-293 (1982)). Animals show polyphagia, polydipsia and polyuria. Mutant diabetic mice (db+/db+) have elevated blood glucose, increased or normal insulin levels, and suppressed cell-mediated immunity (Mandel et al., J. Immunol. 120:1375 (1978); Debray-Sachs, M. et al., Clin. Exp. Immunol. 51(1):1-7 (1983); Leiter et al., Am. J. of Pathol. 114:46-55 (1985)). Peripheral neuropathy, myocardial complications, and microvascular lesions, basement membrane thickening and glomerular filtration abnormalities have been described in these animals (Norido, F. et al., Exp. Neurol. 83(2):221-232 (1984); Robertson et al., Diabetes 29(1):60-67 (1980); Giacomelli et al., Lab Invest. 40(4):460-473 (1979); Coleman, D. L., Diabetes 31 (Suppl):1-6 (1982)). These homozygous diabetic mice develop hyperglycemia that is resistant to insulin analogous to human type II diabetes (Mandel et al., J. Immunol. 120:1375-1377 (1978)).

[1376] The characteristics observed in these animals suggests that healing in this model may be similar to the healing observed in human diabetes (Greenhalgh, et al., Am. J. of Pathol. 136:1235-1246 (1990)).

[1377] Genetically diabetic female C57BL/KsJ (db+/db+) mice and their non-diabetic (db+/+m) heterozygous littermates are used in this study (Jackson Laboratories). The animals are purchased at 6 weeks of age and are 8 weeks old at the beginning of the study. Animals are individually housed and received food and water ad libitum. All manipulations are performed using aseptic techniques. The experiments are conducted according to the rules and guidelines of Human Genome Sciences, Inc. Institutional Animal Care and Use Committee and the Guidelines for the Care and Use of Laboratory Animals.

[1378] Wounding protocol is performed according to previously reported methods (Tsuboi, R. and Rifkin, D. B., J. Exp. Med. 172:245-251 (1990)). Briefly, on the day of wounding, animals are anesthetized with an intraperitoneal injection of Avertin (0.01 mg/mL), 2,2,2-tribromoethanol and 2-methyl-2-butanol dissolved in deionized water. The dorsal region of the animal is shaved and the skin washed with 70% ethanol solution and iodine. The surgical area is dried with sterile gauze prior to wounding. An 8 mm full-thickness wound is then created using a Keyes tissue punch. Immediately following wounding, the surrounding skin is gently stretched to eliminate wound expansion. The wounds are left open for the duration of the experiment. Application of the treatment is given topically for 5 consecutive days commencing on the day of wounding. Prior to treatment, wounds are gently cleansed with sterile saline and gauze sponges.

[1379] Wounds are visually examined and photographed at a fixed distance at the day of surgery and at two day intervals thereafter. Wound closure is determined by daily measurement on days 1-5 and on day 8. Wounds are measured horizontally and vertically using a calibrated Jameson caliper. Wounds are considered healed if granulation tissue is no longer visible and the wound is covered by a continuous epithelium.

[1380] A polypeptide of the invention is administered using at a range different doses, from 4 mg to 500 mg per wound per day for 8 days in vehicle. Vehicle control groups received 50 mL of vehicle solution.

[1381] Animals are euthanized on day 8 with an intraperitoneal injection of sodium pentobarbital (300 mg/kg). The wounds and surrounding skin are then harvested for histology and immunohistochemistry. Tissue specimens are placed in 10% neutral buffered formalin in tissue cassettes between biopsy sponges for further processing.

[1382] Three groups of 10 animals each (5 diabetic and 5 non-diabetic controls) are evaluated: 1) Vehicle placebo control, 2) untreated group, and 3) treated group.

[1383] Wound closure is analyzed by measuring the area in the vertical and horizontal axis and obtaining the total square area of the wound. Contraction is then estimated by establishing the differences between the initial wound area (day 0) and that of post treatment (day 8). The wound area on day 1 is 64 mm², the corresponding size of the dermal punch. Calculations are made using the following formula:
[Open area on day 8]−[Open area on day 1]/[Open area on day 1]

[1384] Specimens are fixed in 10% buffered formalin and paraffin embedded blocks are sectioned perpendicular to the wound surface (5 mm) and cut using a Reichert-Jung microtome. Routine hematoxylin-eosin (H&E) staining is performed on cross-sections of bisected wounds. Histologic examination of the wounds are used to assess whether the healing process and the morphologic appearance of the repaired skin is altered by treatment with a polypeptide of the invention. This assessment included verification of the presence of cell accumulation, inflammatory cells, capillaries, fibroblasts, re-epithelialization and epidermal maturity (Greenhalgh, D. G. et al., Am. J. Pathol. 136:1235 (1990)). A calibrated lens micrometer is used by a blinded observer.

[1385] Tissue sections are also stained immunohistochemically with a polyclonal rabbit anti-human keratin antibody using ABC Elite detection system. Human skin is used as a positive tissue control while non-immune IgG is used as a negative control. Keratinocyte growth is determined by evaluating the extent of reepithelialization of the wound using a calibrated lens micrometer.

[1386] Proliferating cell nuclear antigen/cyclin (PCNA) in skin specimens is demonstrated by using anti-PCNA antibody (1:50) with an ABC Elite detection system. Human colon cancer can serve as a positive tissue control and human brain tissue can be used as a negative tissue control. Each specimen includes a section with omission of the primary antibody and substitution with non-immune mouse IgG. Ranking of these sections is based on the extent of proliferation on a scale of 0-8, the lower side of the scale reflecting slight proliferation to the higher side reflecting intense proliferation.

[1387] Experimental data are analyzed using an unpaired t test. A p value of <0.05 is considered significant.

Steroid Impaired Rat Model

[1388] The inhibition of wound healing by steroids has been well documented in various in vitro and in vivo systems (Wahl, Glucocorticoids and Wound healing. In: Anti-Inflammatory Steroid Action: Basic and Clinical Aspects. 280-302 (1989); Wahlet al., J. Immunol. 115: 476-481 (1975); Werb et al., J. Exp. Med. 147:1684-1694 (1978)). Glucocorticoids retard wound healing by inhibiting angiogenesis, decreasing vascular permeability (Ebert et al., An. Intern. Med. 37:701-705 (1952)), fibroblast proliferation, and collagen synthesis (Beck et al., Growth Factors. 5: 295-304 (1991); Haynes et al., J. Clin. Invest. 61: 703-797 (1978)) and producing a transient reduction of circulating monocytes (Haynes et al., J. Clin. Invest. 61: 703-797 (1978); Wahl, “Glucocorticoids and wound healing”, In: Antiinflammatory Steroid Action: Basic and Clinical Aspects, Academic Press, New York, pp. 280-302 (1989)). The systemic administration of steroids to impaired wound healing is a well establish phenomenon in rats (Beck et al., Growth Factors. 5: 295-304 (1991); Haynes et al., J. Clin. Invest. 61: 703-797 (1978); Wahl, “Glucocorticoids and wound healing”, In: Antiinflammatory Steroid Action: Basic and Clinical Aspects, Academic Press, New York, pp. 280-302 (1989); Pierce et al., Proc. Natl. Acad. Sci. USA 86: 2229-2233 (1989)).

[1389] To demonstrate that a polypeptide of the invention can accelerate the healing process, the effects of multiple topical applications of the polypeptide on full thickness excisional skin wounds in rats in which healing has been impaired by the systemic administration of methylprednisolone is assessed.

[1390] Young adult male Sprague Dawley rats weighing 250-300 g (Charles River Laboratories) are used in this example. The animals are purchased at 8 weeks of age and are 9 weeks old at the beginning of the study. The healing response of rats is impaired by the systemic administration of methylprednisolone (17 mg/kg/rat intramuscularly) at the time of wounding. Animals are individually housed and received food and water ad libitum. All manipulations are performed using aseptic techniques. This study is conducted according to the rules and guidelines of Human Genome Sciences, Inc. Institutional Animal Care and Use Committee and the Guidelines for the Care and Use of Laboratory Animals.

[1391] The wounding protocol is followed according to section A, above. On the day of wounding, animals are anesthetized with an intramuscular injection of ketamine (50 mg/kg) and xylazine (5 mg/kg). The dorsal region of the animal is shaved and the skin washed with 70% ethanol and iodine solutions. The surgical area is dried with sterile gauze prior to wounding. An 8 mm full-thickness wound is created using a Keyes tissue punch. The wounds are left open for the duration of the experiment. Applications of the testing materials are given topically once a day for 7 consecutive days commencing on the day of wounding and subsequent to methylprednisolone administration. Prior to treatment, wounds are gently cleansed with sterile saline and gauze sponges.

[1392] Wounds are visually examined and photographed at a fixed distance at the day of wounding and at the end of treatment. Wound closure is determined by daily measurement on days 1-5 and on day 8. Wounds are measured horizontally and vertically using a calibrated Jameson caliper. Wounds are considered healed if granulation tissue is no longer visible and the wound is covered by a continuous epithelium.

[1393] The polypeptide of the invention is administered using at a range different doses, from 4 mg to 500 mg per wound per day for 8 days in vehicle. Vehicle control groups received 50 mL of vehicle solution.

[1394] Animals are euthanized on day 8 with an intraperitoneal injection of sodium pentobarbital (300 mg/kg). The wounds and surrounding skin are then harvested for histology. Tissue specimens are placed in 10% neutral buffered formalin in tissue cassettes between biopsy sponges for further processing.

[1395] Four groups of 10 animals each (5 with methylprednisolone and 5 without glucocorticoid) are evaluated: 1) Untreated group 2) Vehicle placebo control 3) treated groups.

[1396] Wound closure is analyzed by measuring the area in the vertical and horizontal axis and obtaining the total area of the wound. Closure is then estimated by establishing the differences between the initial wound area (day 0) and that of post treatment (day 8). The wound area on day 1 is 64 mm², the corresponding size of the dermal punch. Calculations are made using the following formula:
[Open area on day 8]−[Open area on day 1]/[Open area on day 1]

[1397] Specimens are fixed in 10% buffered formalin and paraffin embedded blocks are sectioned perpendicular to the wound surface (5 mm) and cut using an Olympus microtome. Routine hematoxylin-eosin (H&E) staining is performed on cross-sections of bisected wounds. Histologic examination of the wounds allows assessment of whether the healing process and the morphologic appearance of the repaired skin is improved by treatment with a polypeptide of the invention. A calibrated lens micrometer is used by a blinded observer to determine the distance of the wound gap.

[1398] Experimental data are analyzed using an unpaired t test. A p value of <0.05 is considered significant.

[1399] The studies described in this example tested activity of a polypeptide of the invention. However, one skilled in the art could easily modify the exemplified studies to test the activity of polynucleotides (e.g., gene therapy), agonists, and/or antagonists of the invention.

### Example 51

### Lymphadema Animal Model

[1400] The purpose of this experimental approach is to create an appropriate and consistent lymphedema model for testing the therapeutic effects of a polypeptide of the invention in lymphangiogenesis and re-establishment of the lymphatic circulatory system in the rat hind limb. Effectiveness is measured by swelling volume of the affected limb, quantification of the amount of lymphatic vasculature, total blood plasma protein, and histopathology. Acute lymphedema is observed for 7-10 days. Perhaps more importantly, the chronic progress of the edema is followed for up to 3-4 weeks.

[1401] Prior to beginning surgery, blood sample is drawn for protein concentration analysis. Male rats weighing approximately ˜350 g are dosed with Pentobarbital. Subsequently, the right legs are shaved from knee to hip. The shaved area is swabbed with gauze soaked in 70% EtOH. Blood is drawn for serum total protein testing. Circumference and volumetric measurements are made prior to injecting dye into paws after marking 2 measurement levels (0.5 cm above heel, at mid-pt of dorsal paw). The intradermal dorsum of both right and left paws are injected with 0.05 ml of 1% Evan's Blue. Circumference and volumetric measurements are then made following injection of dye into paws.

[1402] Using the knee joint as a landmark, a mid-leg inguinal incision is made circumferentially allowing the femoral vessels to be located. Forceps and hemostats are used to dissect and separate the skin flaps. After locating the femoral vessels, the lymphatic vessel that runs along side and underneath the vessel(s) is located. The main lymphatic vessels in this area are then electrically coagulated suture ligated.

[1403] Using a microscope, muscles in back of the leg (near the semitendinosis and adductors) are bluntly dissected. The popliteal lymph node is then located. The 2 proximal and 2 distal lymphatic vessels and distal blood supply of the popliteal node are then and ligated by suturing. The popliteal lymph node, and any accompanying adipose tissue, is then removed by cutting connective tissues.

[1404] Care is taken to control any mild bleeding resulting from this procedure. After lymphatics are occluded, the skin flaps are sealed by using liquid skin (Vetbond) (AJ Buck). The separated skin edges are sealed to the underlying muscle tissue while leaving a gap of ˜0.5 cm around the leg. Skin also may be anchored by suturing to underlying muscle when necessary.

[1405] To avoid infection, animals are housed individually with mesh (no bedding). Recovering animals are checked daily through the optimal edematous peak, which typically occurred by day 5-7. The plateau edematous peak are then observed. To evaluate the intensity of the lymphedema, the circumference and volumes of 2 designated places on each paw before operation and daily for 7 days are measured. The effect plasma proteins on lymphedema is determined and whether protein analysis is a useful testing perimeter is also investigated. The weights of both control and edematous limbs are evaluated at 2 places. Analysis is performed in a blind manner.

[1406] Circumference Measurements: Under brief gas anesthetic to prevent limb movement, a cloth tape is used to measure limb circumference. Measurements are done at the ankle bone and dorsal paw by 2 different people then those 2 readings are averaged. Readings are taken from both control and edematous limbs.

[1407] Volumetric Measurements: On the day of surgery, animals are anesthetized with Pentobarbital and are tested prior to surgery. For daily volumetrics animals are under brief halothane anesthetic (rapid immobilization and quick recovery), both legs are shaved and equally marked using waterproof marker on legs. Legs are first dipped in water, then dipped into instrument to each marked level then measured by Buxco edema software (Chem/Victor). Data is recorded by one person, while the other is dipping the limb to marked area.

[1408] Blood-plasma protein measurements: Blood is drawn, spun, and serum separated prior to surgery and then at conclusion for total protein and Ca2+ comparison.

[1409] Limb Weight Comparison: After drawing blood, the animal is prepared for tissue collection. The limbs are amputated using a quillitine, then both experimental and control legs are cut at the ligature and weighed. A second weighing is done as the tibio-cacaneal joint is disarticulated and the foot is weighed.

[1410] Histological Preparations: The transverse muscle located behind the knee (popliteal) area is dissected and arranged in a metal mold, filled with freezeGel, dipped into cold methylbutane, placed into labeled sample bags at −80EC until sectioning. Upon sectioning, the muscle is observed under fluorescent microscopy for lymphatics.

[1411] The studies described in this example tested activity of a polypeptide of the invention. However, one skilled in the art could easily modify the exemplified studies to test the activity of polynucleotides (e.g., gene therapy), agonists, and/or antagonists of the invention.

### Example 52

### Suppression of TNF Alpha-Induced Adhesion Molecule Expression by a Polypeptide of the Invention

[1412] The recruitment of lymphocytes to areas of inflammation and angiogenesis involves specific receptor-ligand interactions between cell surface adhesion molecules (CAMs) on lymphocytes and the vascular endothelium. The adhesion process, in both normal and pathological settings, follows a multi-step cascade that involves intercellular adhesion molecule-1 (ICAM-1), vascular cell adhesion molecule-1 (VCAM-1), and endothelial leukocyte adhesion molecule-1 (E-selectin) expression on endothelial cells (EC). The expression of these molecules and others on the vascular endothelium determines the efficiency with which leukocytes may adhere to the local vasculature and extravasate into the local tissue during the development of an inflammatory response. The local concentration of cytokines and growth factor participate in the modulation of the expression of these CAMs.

[1413] Tumor necrosis factor alpha (TNF-a), a potent proinflammatory cytokine, is a stimulator of all three CAMs on endothelial cells and may be involved in a wide variety of inflammatory responses, often resulting in a pathological outcome.

[1414] The potential of a polypeptide of the invention to mediate a suppression of TNF-a induced CAM expression can be examined. A modified ELISA assay which uses ECs as a solid phase absorbent is employed to measure the amount of CAM expression on TNF-a treated ECs when co-stimulated with a member of the FGF family of proteins.

[1415] To perform the experiment, human umbilical vein endothelial cell (HUVEC) cultures are obtained from pooled cord harvests and maintained in growth medium (EGM-2; Clonetics, San Diego, Calif.) supplemented with 10% FCS and 1% penicillin/streptomycin in a 37 degree C. humidified incubator containing 5% CO₂. HUVECs are seeded in 96-well plates at concentrations of 1×10⁴ cells/well in EGM medium at 37 degree C. for 18-24 hrs or until confluent. The monolayers are subsequently washed 3 times with a serum-free solution of RPMI-1640 supplemented with 100 U/ml penicillin and 100 mg/ml streptomycin, and treated with a given cytokine and/or growth factor(s) for 24 h at 37 degree C. Following incubation, the cells are then evaluated for CAM expression.

[1416] Human Umbilical Vein Endothelial cells (HUVECs) are grown in a standard 96 well plate to confluence. Growth medium is removed from the cells and replaced with 90 ul of 199 Medium (10% FBS). Samples for testing and positive or negative controls are added to the plate in triplicate (in 10 ul volumes). Plates are incubated at 37 degree C. for either 5 h (selectin and integrin expression) or 24 h (integrin expression only). Plates are aspirated to remove medium and 100 μl of 0.1% paraformaldehyde-PBS (with Ca++ and Mg++) is added to each well. Plates are held at 4° C. for 30 min.

[1417] Fixative is then removed from the wells and wells are washed 1× with PBS(+Ca,Mg)+0.5% BSA and drained. Do not allow the wells to dry. Add 10 μl of diluted primary antibody to the test and control wells. Anti-ICAM-1-Biotin, Anti-VCAM-1-Biotin and Anti-E-selectin-Biotin are used at a concentration of 10 μg/ml (1:10 dilution of 0.1 mg/ml stock antibody). Cells are incubated at 37° C. for 30 min. in a humidified environment. Wells are washed X3 with PBS(+Ca,Mg)+0.5% BSA.

[1418] Then add 20 μl of diluted ExtrAvidin-Alkaline Phosphotase (1:5,000 dilution) to each well and incubated at 37° C. for 30 min. Wells are washed ×3 with PBS(+Ca, Mg)+0.5% BSA. 1 tablet of p-Nitrophenol Phosphate pNPP is dissolved in 5 ml of glycine buffer (pH 10.4). 100 μl of pNPP substrate in glycine buffer is added to each test well. Standard wells in triplicate are prepared from the working dilution of the ExtrAvidin-Alkaline Phosphotase in glycine buffer: 1:5,000 (10⁰)>10^{0.5}>10⁻¹>10^{-1.5}. 5 μl of each dilution is added to triplicate wells and the resulting AP content in each well is 5.50 ng, 1.74 ng, 0.55 ng, 0.18 ng. 100 μl of pNNP reagent must then be added to each of the standard wells. The plate must be incubated at 37° C. for 4 h. A volume of 50 μl of 3M NaOH is added to all wells. The results are quantified on a plate reader at 405 nm. The background subtraction option is used on blank wells filled with glycine buffer only. The template is set up to indicate the concentration of AP-conjugate in each standard well [5.50 ng; 1.74 ng; 0.55 ng; 0.18 ng]. Results are indicated as amount of bound AP-conjugate in each sample.

[1419] The studies described in this example tested activity of a polypeptide of the invention. However, one skilled in the art could easily modify the exemplified studies to test the activity of polynucleotides (e.g., gene therapy), agonists, and/or antagonists of the invention.

### Example 53

### Assay for the Stimulation of Bone Marrow CD34+ Cell Proliferation

[1420] This assay is based on the ability of human CD34+ to proliferate in the presence of hematopoietic growth factors and evaluates the ability of isolated polypeptides expressed in mammalian cells to stimulate proliferation of CD34+cells.

[1421] It has been previously shown that most mature precursors will respond to only a single signal. More immature precursors require at least two signals to respond. Therefore, to test the effect of polypeptides on hematopoietic activity of a wide range of progenitor cells, the assay contains a given polypeptide in the presence or absence of other hematopoietic growth factors. Isolated cells are cultured for 5 days in the presence of Stem Cell Factor (SCF) in combination with tested sample. SCF alone has a very limited effect on the proliferation of bone marrow (BM) cells, acting in such conditions only as a “survival” factor. However, combined with any factor exhibiting stimulatory effect on these cells (e.g., IL-3), SCF will cause a synergistic effect. Therefore, if the tested polypeptide has a stimulatory effect on a hematopoietic progenitors, such activity can be easily detected. Since normal BM cells have a low level of cycling cells, it is likely that any inhibitory effect of a given polypeptide, or agonists or antagonists thereof, might not be detected. Accordingly, assays for an inhibitory effect on progenitors is preferably tested in cells that are first subjected to in vitro stimulation with SCF+IL+3, and then contacted with the compound that is being evaluated for inhibition of such induced proliferation.

[1422] Briefly, CD34+ cells are isolated using methods known in the art. The cells are thawed and resuspended in medium (QBSF 60 serum-free medium with 1% L-glutamine (500 ml) Quality Biological, Inc., Gaithersburg, Md. Cat# 160-204-101). After several gentle centrifugation steps at 200×g, cells are allowed to rest for one hour. The cell count is adjusted to 2.5×10⁵ cells/ml. During this time, 100 μl of sterile water is added to the peripheral wells of a 96-well plate. The cytokines that can be tested with a given polypeptide in this assay is rhSCF (R&D Systems, Minneapolis, Minn., Cat# 255-SC) at 50 ng/ml alone and in combination with rhSCF and rhIL-3 (R&D Systems, Minneapolis, Minn., Cat# 203-ML) at 30 ng/ml. After one hour, 10 μl of prepared cytokines, 50 μl SID (supernatants at 1:2 dilution=50 μl) and 20 μl of diluted cells are added to the media which is already present in the wells to allow for a final total volume of 100 μl. The plates are then placed in a 37° C./5% CO₂ incubator for five days.

[1423] Eighteen hours before the assay is harvested, 0.5 μCi/well of [3H] Thymidine is added in a 10 μl volume to each well to determine the proliferation rate. The experiment is terminated by harvesting the cells from each 96-well plate to a filtermat using the Tomtec Harvester 96. After harvesting, the filtermats are dried, trimmed and placed into OnmiFilter assemblies consisting of one OmniFilter plate and one OmniFilter Tray. 60 μl Microscint is added to each well and the plate sealed with TopSeal-A press-on sealing film A bar code 15 sticker is affixed to the first plate for counting. The sealed plates is then loaded and the level of radioactivity determined via the Packard Top Count and the printed data collected for analysis. The level of radioactivity reflects the amount of cell proliferation.

[1424] The studies described in this example test the activity of a given polypeptide to stimulate bone marrow CD34+ cell proliferation. One skilled in the art could easily modify the exemplified studies to test the activity of polynucleotides (e.g., gene therapy), antibodies, agonists, and/or antagonists and fragments and variants thereof. As a nonlimiting example, potential antagonists tested in this assay would be expected to inhibit cell proliferation in the presence of cytokines and/or to increase the inhibition of cell proliferation in the presence of cytokines and a given polypeptide. In contrast, potential agonists tested in this assay would be expected to enhance cell proliferation and/or to decrease the inhibition of cell proliferation in the presence of cytokines and a given polypeptide.

[1425] The ability of a gene to stimulate the proliferation of bone marrow CD34+ cells indicates that polynucleotides and polypeptides corresponding to the gene are useful for the diagnosis and treatment of disorders affecting the immune system and hematopoiesis. Representative uses are described in the “Immune Activity” and “Infectious Disease” sections above, and elsewhere herein.

### Example 54

### Assay for Extracellular Matrix Enhanced Cell Response (EMECR)

[1426] The objective of the Extracellular Matrix Enhanced Cell Response (EMECR) assay is to identify gene products (e.g., isolated polypeptides) that act on the hematopoietic stem cells in the context of the extracellular matrix (ECM) induced signal.

[1427] Cells respond to the regulatory factors in the context of signal(s) received from the surrounding microenvironment. For example, fibroblasts, and endothelial and epithelial stem cells fail to replicate in the absence of signals from the ECM. Hematopoietic stem cells can undergo self-renewal in the bone marrow, but not in in vitro suspension culture. The ability of stem cells to undergo self-renewal in vitro is dependent upon their interaction with the stromal cells and the ECM protein fibronectin (fn). Adhesion of cells to fn is mediated by the α₅.β₁ and α₄.β₁ integrin receptors, which are expressed by human and mouse hematopoietic stem cells. The factor(s) which integrate with the ECM environment and responsible for stimulating stem cell self-renewal has not yet been identified. Discovery of such factors should be of great interest in gene therapy and bone marrow transplant applications.

[1428] Briefly, polystyrene, non tissue culture treated, 96-well plates are coated with fn fragment at a coating concentration of 0.2 μg/cm². Mouse bone marrow cells are plated (1,000 cells/well) in 0.2 ml of serum-free medium. Cells cultured in the presence of IL-3 (5 ng/ml)+SCF (50 ng/ml) would serve as the positive control, conditions under which little self-renewal but pronounced differentiation of the stem cells is to be expected. Gene products are tested with appropriate negative controls in the presence and absence of SCF (5.0 ng/ml), where test factor supernates represent 10% of the total assay volume. The plated cells are then allowed to grow by incubating in a low oxygen environment (5% CO₂, 7% O₂, and 88% N₂) tissue culture incubator for 7 days. The number of proliferating cells within the wells is then quantitated by measuring thymidine incorporation into cellular DNA. Verification of the positive hits in the assay will require phenotypic characterization of the cells, which can be accomplished by scaling up of the culture system and using appropriate antibody reagents against cell surface antigens and FACScan.

[1429] One skilled in the art could easily modify the exemplified studies to test the activity of polynucleotides (e.g., gene therapy), antibodies, agonists, and/or antagonists and fragments and variants thereof.

[1430] If a particular gene product is found to be a stimulator of hematopoietic progenitors, polynucleotides and polypeptides corresponding to the gene may be useful for the diagnosis and treatment of disorders affecting the immune system and hematopoiesis. Representative uses are described in the “Immune Activity” and “Infectious Disease” sections above, and elsewhere herein. The gene product may also be useful in the expansion of stem cells and committed progenitors of various blood lineages, and in the differentiation and/or proliferation of various cell types.

[1431] Additionally, the polynucleotides and/or polypeptides of the gene of interest and/or agonists and/or antagonists thereof, may also be employed to inhibit the proliferation and differentiation of hematopoietic cells and therefore may be employed to protect bone marrow stem cells from chemotherapeutic agents during chemotherapy. This antiproliferative effect may allow administration of higher doses of chemotherapeutic agents and, therefore, more effective chemotherapeutic treatment.

[1432] Moreover, polynucleotides and polypeptides corresponding to the gene of interest may also be useful for the treatment and diagnosis of hematopoietic related disorders such as, for example, anemia, pancytopenia, leukopenia, thrombocytopenia or leukemia since stromal cells are important in the production of cells of hematopoietic lineages. The uses include bone marrow cell ex-vivo culture, bone marrow transplantation, bone marrow reconstitution, radiotherapy or chemotherapy of neoplasia.

### Example 55

### Human Dermal Fibroblast and Aortic Smooth Muscle Cell Proliferation

[1433] The polypeptide of interest is added to cultures of normal human dermal fibroblasts (NHDF) and human aortic smooth muscle cells (AoSMC) and two co-assays are performed with each sample. The first assay examines the effect of the polypeptide of interest on the proliferation of normal human dermal fibroblasts (NHDF) or aortic smooth muscle cells (AoSMC). Aberrant growth of fibroblasts or smooth muscle cells is a part of several pathological processes, including fibrosis, and restenosis. The second assay examines IL6 production by both NHDF and SMC. IL6 production is an indication of functional activation. Activated cells will have increased production of a number of cytokines and other factors, which can result in a proinflammatory or immunomodulatory outcome. Assays are run with and without co-TNFa stimulation, in order to check for costimulatory or inhibitory activity.

[1434] Briefly, on day 1, 96-well black plates are set up with 1000 cells/well (NHDF) or 2000 cells/well (AoSMC) in 100 μl culture media. NHDF culture media contains: Clonetics FB basal media, 1 mg/ml hFGF, 5 mg/ml insulin, 50 mg/ml gentamycin, 2% FBS, while AoSMC culture media contains Clonetics SM basal media, 0.5 μg/ml hEGF, 5 mg/ml insulin, 1 μg/ml hFGF, 50 mg/ml gentamycin, 50 μg/ml Amphotericin B, 5% FBS. After incubation @ 37° C. for at least 4-5 hours culture media is aspirated and replaced with growth arrest media. Growth arrest media for NHDF contains fibroblast basal media, 50 mg/ml gentamycin, 2% FBS, while growth arrest media for AoSMC contains SM basal media, 50 mg/ml gentamycin, 50 μg/ml Amphotericin B, 0.4% FBS. Incubate at 37 C until day 2.

[1435] On day 2, serial dilutions and templates of the polypeptide of interest are designed which should always include media controls and known-protein controls. For both stimulation and inhibition experiments, proteins are diluted in growth arrest media. For inhibition experiments, TNFa is added to a final concentration of 2 ng/ml (NHDF) or 5 ng/ml (AoSMC). Then add ⅓ vol media containing controls or supernatants and incubate at 37 C/5% CO₂ until day 5.

[1436] Transfer 60 μl from each well to another labeled 96-well plate, cover with a plate-sealer, and store at 4 C until Day 6 (for IL6 ELISA). To the remaining 100 μl in the cell culture plate, aseptically add Alamar Blue in an amount equal to 10% of the culture volume (10 μl). Return plates to incubator for 3 to 4 hours. Then measure fluorescence with excitation at 530 nm and emission at 590 nm using the CytoFluor. This yields the growth stimulation/inhibition data.

[1437] On day 5, the IL6 ELISA is performed by coating a 96 well plate with 50-100 ul/well of Anti-Human IL6 Monoclonal antibody diluted in PBS, pH 7.4, incubate ON at room temperature.

[1438] On day 6, empty the plates into the sink and blot on paper towels. Prepare Assay Buffer containing PBS with 4% BSA. Block the plates with 200 μl/well of Pierce Super Block blocking buffer in PBS for 1-2 hr and then wash plates with wash buffer (PBS, 0.05% Tween-20). Blot plates on paper towels. Then add 50 μl/well of diluted Anti-Human IL-6 Monoclonal, Biotin-labeled antibody at 0.50 mg/ml. Make dilutions of IL-6 stock in media (30, 10, 3, 1, 0.3, 0 ng/ml). Add duplicate samples to top row of plate. Cover the plates and incubate for 2 hours at RT on shaker.

[1439] Wash plates with wash buffer and blot on paper towels. Dilute EU-labeled Streptavidin 1:1000 in Assay buffer, and add 100 μl/well. Cover the plate and incubate 1 h at RT. Wash plates with wash buffer. Blot on paper towels.

[1440] Add 100 μl/well of Enhancement Solution. Shake for 5 minutes. Read the plate on the Wallac DELFIA Fluorometer. Readings from triplicate samples in each assay were tabulated and averaged.

[1441] A positive result in this assay suggests AoSMC cell proliferation and that the gene product of interest may be involved in dermal fibroblast proliferation and/or smooth muscle cell proliferation. A positive result also suggests many potential uses of polypeptides, polynucleotides, agonists and/or antagonists of the gene/gene product of interest. For example, inflammation and immune responses, wound healing, and angiogenesis, as detailed throughout this specification. Particularly, polypeptides of the gene product and polynucleotides of the gene may be used in wound healing and dermal regeneration, as well as the promotion of vasculargenesis, both of the blood vessels and lymphatics. The growth of vessels can be used in the treatment of, for example, cardiovascular diseases. Additionally, antagonists of polypeptides of the gene product and polynucleotides of the gene may be useful in treating diseases, disorders, and/or conditions which involve angiogenesis by acting as an anti-vascular (e.g., anti-angiogenesis). These diseases, disorders, and/or conditions are known in the art and/or are described herein, such as, for example, malignancies, solid tumors, benign tumors, for example hemangiomas, acoustic neuromas, neurofibromas, trachomas, and pyogenic granulomas; artheroscleric plaques; ocular angiogenic diseases, for example, diabetic retinopathy, retinopathy of prematurity, macular degeneration, corneal graft rejection, neovascular glaucoma, retrolental fibroplasia, rubeosis, retinoblastoma, uvietis and Pterygia (abnormal blood vessel growth) of the eye; rheumatoid arthritis; psoriasis; delayed wound healing; endometriosis; vasculogenesis; granulations; hypertrophic scars (keloids); nonunion fractures; scleroderma; trachoma; vascular adhesions; myocardial angiogenesis; coronary collaterals; cerebral collaterals; arteriovenous malformations; ischemic limb angiogenesis; Osler-Webber Syndrome; plaque neovascularization; telangiectasia; hemophiliac joints; angiofibroma; fibromuscular dysplasia; wound granulation; Crohn's disease; and atherosclerosis. Moreover, antagonists of polypeptides of the gene product and polynucleotides of the gene may be useful in treating anti-hyperproliferative diseases and/or anti-inflammatory known in the art and/or described herein.

[1442] One skilled in the art could easily modify the exemplified studies to test the activity of polynucleotides (e.g., gene therapy), antibodies, agonists, and/or antagonists and fragments and variants thereof.

### Example 56

### Cellular Adhesion Molecule (CAM) Expression on Endothelial Cells

[1443] The recruitment of lymphocytes to areas of inflammation and angiogenesis involves specific receptor-ligand interactions between cell surface adhesion molecules (CAMs) on lymphocytes and the vascular endothelium. The adhesion process, in both normal and pathological settings, follows a multi-step cascade that involves intercellular adhesion molecule-1 (ICAM-1), vascular cell adhesion molecule-1 (VCAM-1), and endothelial leukocyte adhesion molecule-1 (E-selectin) expression on endothelial cells (EC). The expression of these molecules and others on the vascular endothelium determines the efficiency with which leukocytes may adhere to the local vasculature and extravasate into the local tissue during the development of an inflammatory response. The local concentration of cytokines and growth factor participate in the modulation of the expression of these CAMs.

[1444] Briefly, endothelial cells (e.g., Human Umbilical Vein Endothelial cells (HUVECs)) are grown in a standard 96 well plate to confluence, growth medium is removed from the cells and replaced with 100 μL of 199 Medium (10% fetal bovine serum (FBS)). Samples for testing and positive or negative controls are added to the plate in triplicate (in 10 μl volumes). Plates are then incubated at 37° C. for either 5 h (selectin and integrin expression) or 24 h (integrin expression only). Plates are aspirated to remove medium and 100 μl of 0.1% paraformaldehyde-PBS (with Ca++ and Mg++) is added to each well. Plates are held at 4° C. for 30 min. Fixative is removed from the wells and wells are washed 1× with PBS(+Ca, Mg)+0.5% BSA and drained. 10 μl of diluted primary antibody is added to the test and control wells. Anti-ICAM-1-Biotin, Anti-VCAM-1-Biotin and Anti-E-selectin-Biotin are used at a concentration of 10 μg/ml (1:10 dilution of 0.1 mg/ml stock antibody). Cells are incubated at 37° C. for 30 min. in a humidified environment. Wells are washed three times with PBS(+Ca, Mg)+0.5% BSA. 20 μl of diluted ExtrAvidin-Alkaline Phosphotase (1:5,000 dilution, refered to herein as the working dilution) are added to each well and incubated at 37° C. for 30 min. Wells are washed three times with PBS(+Ca, Mg)+0.5% BSA. Dissolve 1 tablet of p-Nitrophenol Phosphate pNPP per 5 ml of glycine buffer (pH 10.4). 100 μl of pNPP substrate in glycine buffer is added to each test well. Standard wells in triplicate are prepared from the working dilution of the ExtrAvidin-Alkaline Phosphotase in glycine buffer: 1:5,000 (10⁰)>10^{0.5}>10⁻¹>10^{-1.5} . 5 μl of each dilution is added to triplicate wells and the resulting AP content in each well is 5.50 ng, 1.74 ng, 0.55 ng, 0.18 ng. 100 μl of pNNP reagent is then added to each of the standard wells. The plate is incubated at 37° C. for 4 h. A volume of 50 μl of 3M NaOH is added to all wells. The plate is read on a plate reader at 405 nm using the background subtraction option on blank wells filled with glycine buffer only. Additionally, the template is set up to indicate the concentration of AP-conjugate in each standard well [5.50 ng; 1.74 ng; 0.55 ng; 0.18 ng]. Results are indicated as amount of bound AP-conjugate in each sample.

### Example 57

### Alamar Blue Endothelial Cells Proliferation Assay

[1445] This assay may be used to quantitatively determine protein mediated inhibition of bFGF-induced proliferation of Bovine Lymphatic Endothelial Cells (LECs), Bovine Aortic Endothelial Cells (BAECs) or Human Microvascular Uterine Myometrial Cells (UTMECs). This assay incorporates a fluorometric growth indicator based on detection of metabolic activity. A standard Alamar Blue Proliferation Assay is prepared in EGM-2MV with 10 ng/ml of bFGF added as a source of endothelial cell stimulation. This assay may be used with a variety of endothelial cells with slight changes in growth medium and cell concentration. Dilutions of the protein batches to be tested are diluted as appropriate. Serum-free medium (GIBCO SFM) without bFGF is used as a non-stimulated control and Angiostatin or TSP-1 are included as a known inhibitory controls.

[1446] Briefly, LEC, BAECs or UTMECs are seeded in growth media at a density of 5000 to 2000 cells/well in a 96 well plate and placed at 37-C overnight. After the overnight incubation of the cells, the growth media is removed and replaced with GIBCO EC-SFM. The cells are treated with the appropriate dilutions of the protein of interest or control protein sample(s) (prepared in SFM) in triplicate wells with additional bFGF to a concentration of 10 ng/ml. Once the cells have been treated with the samples, the plate(s) is/are placed back in the 37° C. incubator for three days. After three days 10 ml of stock alamar blue (Biosource Cat# DALI 100) is added to each well and the plate(s) is/are placed back in the 37° C. incubator for four hours. The plate(s) are then read at 530 nm excitation and 590 nm emission using the CytoFluor fluorescence reader. Direct output is recorded in relative fluorescence units.

[1447] Alamar blue is an oxidation-reduction indicator that both fluoresces and changes color in response to chemical reduction of growth medium resulting from cell growth. As cells grow in culture, innate metabolic activity results in a chemical reduction of the immediate surrounding environment. Reduction related to growth causes the indicator to change from oxidized (non-fluorescent blue) form to reduced (fluorescent red) form. i.e. stimulated proliferation will produce a stronger signal and inhibited proliferation will produce a weaker signal and the total signal is proportional to the total number of cells as well as their metabolic activity. The background level of activity is observed with the starvation medium alone. This is compared to the output observed from the positive control samples (bFGF in growth medium) and protein dilutions.

### Example 58

### Detection of Inhibition of a Mixed Lymphocyte Reaction

[1448] This assay can be used to detect and evaluate inhibition of a Mixed Lymphocyte Reaction (MLR) by gene products (e.g., isolated polypeptides). Inhibition of a MLR may be due to a direct effect on cell proliferation and viability, modulation of costimulatory molecules on interacting cells, modulation of adhesiveness between lymphocytes and accessory cells, or modulation of cytokine production by accessory cells. Multiple cells may be targeted by these polypeptides since the peripheral blood mononuclear fraction used in this assay includes T, B and natural killer lymphocytes, as well as monocytes and dendritic cells.

[1449] Polypeptides of interest found to inhibit the MLR may find application in diseases associated with lymphocyte and monocyte activation or proliferation. These include, but are not limited to, diseases such as asthma, arthritis, diabetes, inflammatory skin conditions, psoriasis, eczema, systemic lupus erythematosus, multiple sclerosis, glomerulonephritis, inflammatory bowel disease, crohn's disease, ulcerative colitis, arteriosclerosis, cirrhosis, graft vs. host disease, host vs. graft disease, hepatitis, leukemia and lymphoma.

[1450] Briefly, PBMCs from human donors are purified by density gradient centrifugation using Lymphocyte Separation Medium (LSM®, density 1.0770 g/ml, Organon Teknika Corporation, West Chester, Pa.). PBMCs from two donors are adjusted to 2×10⁶ cells/ml in RPMI-1640 (Life Technologies, Grand Island, N.Y.) supplemented with 10% FCS and 2 mM glutamine. PBMCs from a third donor is adjusted to 2×10⁵ cells/ml. Fifty microliters of PBMCs from each donor is added to wells of a 96-well round bottom microtiter plate. Dilutions of test materials (50 μl) is added in triplicate to microtiter wells. Test samples (of the protein of interest) are added for final dilution of 1:4; rhuIL-2 (R&D Systems, Minneapolis, Minn., catalog number 202-IL) is added to a final concentration of 1 μg/ml; anti-CD4 mAb (R&D Systems, clone 34930.11, catalog number MAB379) is added to a final concentration of 10 μg/ml. Cells are cultured for 7-8 days at 37° C. in 5% CO₂, and 1 μC of [³H] thymidine is added to wells for the last 16 hrs of culture. Cells are harvested and thymidine incorporation determined using a Packard TopCount. Data is expressed as the mean and standard deviation of triplicate determinations.

[1451] Samples of the protein of interest are screened in separate experiments and compared to the negative control treatment, anti-CD4 mAb, which inhibits proliferation of lymphocytes and the positive control treatment, IL-2 (either as recombinant material or supernatant), which enhances proliferation of lymphocytes.

[1452] One skilled in the art could easily modify the exemplified studies to test the activity of polynucleotides (e.g., gene therapy), antibodies, agonists, and/or antagonists and fragments and variants thereof.

[1453] It will be clear that the invention may be practiced otherwise than as particularly described in the foregoing description and examples. Numerous modifications and variations of the present invention are possible in light of the above teachings and, therefore, are within the scope of the appended claims.

[1454] The entire disclosure of each document cited (including patents, patent applications, journal articles, abstracts, laboratory manuals, books, or other disclosures) in the Background of the Invention, Detailed Description, and Examples is hereby incorporated herein by reference. Further, the hard copy of the sequence listing submitted herewith and the corresponding computer readable form are both incorporated herein by reference in their entireties. Additionally, the specifications and sequence listings of U.S. Provisional application Nos. 60/270,658 and 60/304,444, filed Feb. 23, 2001 and Jul. 12, 2001, respectively, are hereby incorporated by reference in its entirety.

The application's sequence listing, which the Patent Office published only in electronic form, follows.

SEQUENCE LISTING (445 sequences)

SEQ ID NO: 1 - DNA, 733 bp, Homo sapiens
gggatccggagcccaaatcttctgacaaaactcacacatgcccaccgtgcccagcacctgaattcgagggtgcaccgtcagtcttcctcttccccccaaaacccaaggacaccctcatgatctcccggactcctgaggtcacatgcgtggtggtggacgtaagccacgaagaccctgaggtcaagttcaactggtacgtggacggcgtggaggtgcataatgccaagacaaagccgcgggaggagcagtacaacagcacgtaccgtgtggtcagcgtcctcaccgtcctgcaccaggactggctgaatggcaaggagtacaagtgcaaggtctccaacaaagccctcccaacccccatcgagaaaaccatctccaaagccaaagggcagccccgagaaccacaggtgtacaccctgcccccatcccgggatgagctgaccaagaaccaggtcagcctgacctgcctggtcaaaggcttctatccaagcgacatcgccgtggagtgggagagcaatgggcagccggagaacaactacaagaccacgcctcccgtgctggactccgacggctccttcttcctctacagcaagctcaccgtggacaagagcaggtggcagcaggggaacgtcttctcatgctccgtgatgcatgaggctctgcacaaccactacacgcagaagagcctctccctgtctccgggtaaatgagtgcgacggccgcgactctagaggat

SEQ ID NO: 2 - protein, 5 aa, Homo sapiens
  Site (3): Xaa equals any of the twenty naturally ocurring L-amino acids
WSXWS

SEQ ID NO: 3 - DNA, 86 bp, Artificial Sequence
  Primer_Bind: Synthetic sequence with 4 tandem copies of the GAS binding site found in the IRF1 promoter (Rothman et al., Immunity 1:457-468 (1994)), 18 nucleotides complementary to the SV40 early promoter, and a Xho I restriction site.
gcgcctcgagatttccccgaaatctagatttccccgaaatgatttccccgaaatgatttccccgaaatatctgccatctcaattag

SEQ ID NO: 4 - DNA, 27 bp, Artificial Sequence
  Primer_Bind: Synthetic sequence complementary to the SV40 promter; includes a Hind III restriction site.
gcggcaagctttttgcaaagcctaggc

SEQ ID NO: 5 - DNA, 271 bp, Artificial Sequence
  Protein_Bind: Synthetic promoter for use in biological assays; includes GAS binding sites found in the IRF1 promoter (Rothman et al., Immunity 1:457-468 (1994)).
ctcgagatttccccgaaatctagatttccccgaaatgatttccccgaaatgatttccccgaaatatctgccatctcaattagtcagcaaccatagtcccgcccctaactccgcccatcccgcccctaactccgcccagttccgcccattctccgccccatggctgactaattttttttatttatgcagaggccgaggccgcctcggcctctgagctattccagaagtagtgaggaggcttttttggaggcctaggcttttgcaaaaagctt

SEQ ID NO: 6 - DNA, 32 bp, Artificial Sequence
  Primer_Bind: Synthetic primer complementary to human genomic EGR-1 promoter sequence (Sakamoto et al., Oncogene 6:867-871 (1991)); includes a Xho I restriction site.
gcgctcgagggatgacagcgatagaaccccgg

SEQ ID NO: 7 - DNA, 31 bp, Artificial Sequence
  Primer_Bind: Synthetic primer complementary to human genomic EGR-1 promoter sequence (Sakamoto et al., Oncogene 6:867-871 (1991)); includes a Hind III restriction site.
gcgaagcttcgcgactccccggatccgcctc

SEQ ID NO: 8 - DNA, 12 bp, Homo sapiens
ggggactttccc

SEQ ID NO: 9 - DNA, 73 bp, Artificial Sequence
  Primer_Bind: Synthetic primer with 4 tandem copies of the NF-KB binding site (GGGGACTTTCCC), 18 nucleotides complementary to the 5' end of the SV40 early promoter sequence, and a XhoI restriction site.
gcggcctcgaggggactttcccggggactttccggggactttccgggactttccatcctgccatctcaattag

SEQ ID NO: 10 - DNA, 256 bp, Artificial Sequence
  Protein_Bind: Synthetic promoter for use in biological assays; includes NF-KB binding sites.
ctcgaggggactttcccggggactttccggggactttccgggactttccatctgccatctcaattagtcagcaaccatagtcccgcccctaactccgcccatcccgcccctaactccgcccagttccgcccattctccgccccatggctgactaattttttttatttatgcagaggccgaggccgcctcggcctctgagctattccagaagtagtgaggaggcttttttggaggcctaggcttttgcaaaaagctt

SEQ ID NO: 11 - DNA, 1172 bp, Homo sapiens
  SITE (25): n equals a,t,g, or c
  SITE (74): n equals a,t,g, or c
  SITE (76): n equals a,t,g, or c
  SITE (861): n equals a,t,g, or c
  SITE (1069): n equals a,t,g, or c
ccaggtaccggcccggaaattcttnggtcgacccacgcgtccggcatgacgaacttctcccttgttcccagccnantcctagaatatgttgcctcttctcaaaaataacgtaccacaaagcctctggtgacggtggagcaaaggaatagatggtgaatgtctcatacccacttcggatccagaacaggcctaggagagactcaggtgggatctgctgctgaggaaaggagttggggctgaagttggaggaagagggcagctctaaaccacctattcctggctctaggcctctcaggccagacagcccccacccgtttctgcagatgcccgcatcatggtcctgaggggatgggggctggcctggagcctttcccccgtggtgtgtggctatagcggggacatgaagggggtgtgttggggacgtagtgaccactcccttctaccgtcagagatcctgcttccccctgccccctgcccctcctcggctgtccttcataaccccccacccactccccacctgccatctcctgtgcttgtgcggatccaggaagcacctacctgggcacagagatcatcgctcggtgcctcgcccctacacaagggcgattaacttctctgttatgaactcctacttagtaattctgacatgaaactcccactaggataaaacttggcgcagaacagcaattactgaaaacacatttttaaaaaggttgatgttttgtaagagttcatcctcctccactcctcagcctcctcaaggagacacatatttagatcttctctgtgtgagtctaacttggagactgtgagttgcagtttaaaaggggctctggggccaggtgcggtggcacacacttngkggtctcagctactcaagargctgagatgtgaggaacgcttraaacccaggagttcaagaccagcctgagcaacatgggtagatgggatctacccaaaacatttaacaataaggctggcatggtggcatatgcctgtggtcccagctacttggaggctgaggcaggagaatcatttaagcctgggagatcgaggctgcagtgaggtntggtttcaactgctgtgctccagcctgggagacagggcaatactgtgtctctaaaaaataaaaaaaaaaaaaaaaaactcgagggggggcccgtacccaattc

SEQ ID NO: 12 - DNA, 1649 bp, Homo sapiens
ccacgcgtccgcaggagagtagttatagaccctcaagagaaacccagtgaggagccccttggggaccgaaggactgtcattgacaaatgctctccacccctagagttcttggatgactctgactctcatttagaaatccaaaagcataaagatagggaggtggtgatggagcacccctcttctggaagtgactggtctgatgttgaggagatctccacagtcagattctctcaggaggaacctgtctccctgaaaccttcagccgttccggagccttcttccttcaccaccgactatgtcatgtaccctcctcatttgtacagtagtccttggtgtgactacgccagctattggaccagcagccccaagccttctagctacccctccacaggcagcagcagcaacgatgcagcccaggttgggaagagcagccggagccgcatgagtgattattcccccaactctacagggagtgtccaaaacacctccagagacatggaggcctcagaggaaggctggtcccagaattctcgttcatttcgcttctccagaagctcagaagaaagagaggtgaaggagaaaagaacattccaagaggagatgcctccgcgtgcttgtggaggacacgcatccagctccctgccaaagagccacctggagccaagcctagaggagggcttcattgacactcattgtcacctggacatgctctattccaagctatctttccaagggacctttacaaagttcagaaaaatttacagcagctccttccctaaggaatttcagggctgcatctctgacttctgtgatccccgcaccctgacagattgcctatgggaggagctgttgaaagaggatctggtctggggggcctttggctgtcaccctcattttgcacgttactacagtgagagtcaagaaagaaatcttttgcaagccttaaggcaccctaaggctgtggcatttggagaaatgggcttggattactcttacaagtgcaccacgcctgtcccagaacagcacaaggtatttgagagacagctgcagctggctgtgtctctaaagaagcccttggtgatccactgccgagaagctgatgaagatctgctagaaatcatgaaaaagtttgtgccccctgactacaagatccataggcattgcttcaccggcagctacccggtcattgagcccctgctgaagtactttcccaacatgtctgtgggcttcacggcagtgctgacatactcctctgcctgggaggcccgggaagccttgaggcagatcccactggagagaatcatcgtggaaacggatgctccctatttcctccctcgccaggttcccaaaagcctttgccagtatgcccacccgggcctggccttgcatacggtccgagagattgccagagtcaaagatcagccactctccctcaccttggctgccttgcgtgagaacaccagtcgcctctacagtctttaagcagagaaggtacagtcctcgggagtctcctagaaaaggtcgtaaaactcacattctgtattttttaaaaaccaggacaagtcttttgttgcattttgttaatgtaaagaatataaacatagtatgagcattaaaaaaaaaaaaaaaaaaaaaaaaaaaaaaaaaaa

SEQ ID NO: 13 - DNA, 1965 bp, Homo sapiens
ccacgcgtccggcccttgccaactctgcctcttcccccgctgactggggtatcagtttatggtgccctgcaggaagaccctcttgttcctgtgggtgggaagcctctgcagagatgtgggcagctggtcaggatggccattcgggctcagcacagcaacgcagcccagactcagactggggaagcaaacaggggctggacaggccaggagagcctgtcggacagtgatcctgagatgtgggagttgctgcagagggagaaggacaggcagtgtcgtggcctggagctcattgcctcagagaacttctgcagccgagctgcgctggaggccctggggtcctgtctgaacaacaagtactcggagggttatcctggcaagagatactatgggggagcagaggtggtggatgaaattgagctgctgtgccagcgccgggccttggaagcctttgacctggatcctgcacagtggggagtcaatgtccagccctactccgggtccccagccaacctggccgtctacacagcccttctgcaacctcacgaccggatcatggggctggacctgcccgatgggggccatctcacccacggctacatgtctgacgtcaagcggatatcagccacgtccatcttcttcgagtctatgccctataagctcaaccccaaaactggcctcattgactacaaccagctggcactgactgctcgacttttccggccacggctcatcatagctggcaccagcgcctatgctcgcctcattgactacgcccgcatgagagaggtgtgtgatgaagtcaaagcacacctgctggcagacatggcccacatcagtggcctggtggctgccaaggtgattccctcgcctttcaagcacgcggacatcgtcaccaccactactcacaagactcttcgaggggccaggtcagggctcatcttctaccggaaaggggtgaaggctgtggaccccaagactggccgggagatcccttacacatttgaggaccgaatcaactttgccgtgttcccatccctgcaggggggcccccacaatcatgccattgctgcagtagctgtggccctaaagcaggcctgcacccccatgttccgggagtactccctgcaggttctgaagaatgctcgggccatggcagatgccctgctagagcgaggctactcactggtatcaggtggtactgacaaccacctggtgctggtggacctgcggcccaagggcctggatggagctcgggctgagcgggtgctagagcttgtatccatcactgccaacaagaacacctgtcctggagaccgaagtgccatcacaccgggcggcctgcggcttggggccccagccttaacttctcgacagttccgtgaggatgacttccggagagttgtggactttatagatgaaggggtcaacattggcttagaggtgaagagcaagactgccaagctccaggatttcaaatccttcctgcttaaggactcagaaacaagtcagcgtctggccaacctcaggcaacgggtggagcagtttgccagggccttccccatgcctggttttgatgagcattgaaggcacctgggaaatgaggcccacagactcaaagttactctccttccccctacctgggccagtgaaatagaaagcctttctattttttggtgcgggagggaagacctctcacttagggcaagagccaggtatagtctcccttcccagaatttgtaactgagaagatcttttctttttcctttttttggtaacaagacttagaaggagggcccaggcactttctgtttgaacccctgtcatgatcacagtgtcagagacgcgtcctctttcttggggaagttgaggagtgcccttcagagccagtagcaggcaggggtgggtaggcaccctccttcctgtttttatctaataaaatgctaacctgcaaaaaaaaaaaaaaaa

SEQ ID NO: 14 - DNA, 3371 bp, Homo sapiens
ccacgcgtccgctcctggcgtgggcaaggctggccaaggatggcgacgcccagtggcctgggggccctgctcctgctcctcctgctcccgacctcaggtcaggaaaagcccaccgaagggccaagaaacacctgcctggggagcaacaacatgtacgacatcttcaacttgaatgacaaggctttgtgcttcaccaagtgcaggcagtcgggcagcgactcctgcaatgtggaaaacttgcagagatactggctaaactacgaggcccatctgatgaaggaaggtttgacgcagaaggtgaacacgcctttcctgaaggctttggtccagaacctcagcaccaacactgcagaagacttctatttctctctggagccctctcaggttccgaggcaggtgatgaaggacgaggacaagccccctgacagagtgcgacttcccaagagcctttttcgatccctgccaggcaacaggtctgtggtccgcttggccgtcaccattctggacattggtccagggactctcttcaaggtgaggactcagggaagctccaaggttaagtgctaggtcctctgggggctccatgccacagtttgctgtcactggagcctgccgagggatccaatggggacagagcaggcagtgagcctcttagtgtttctaatgcagcccgtggccatctcagacacctgtcactagagtctatggtcttcagactcacactggtcacacgctctcagatgtttgacccccacacatgagtgccctttggcttgtctatgtgtcctgtgggtgctcgtgtgctctgtgtgtcctcgtgcatgcacaaacatgcacatccttttctattcttgtgcacgcacaagcccatgtactcagctgtgatcatatccacacgagcaagtgtacccatgcccttgcacatgtgtataccaggtatgtgcacccagaggtgtgcatccactcctgtgcagacgtgtgtacccctgagggctagtgtgctccccccaccagcctcctttctaccgaatgcacactcacgctaagaccctcaggggcacgctatcctccccgctgacttccatttcttggctgatcttggccccatgccccctctagttaagagggcagaggagctctggaggccagcaatggagagctgtcaggtgcacagctttgcagccagttgacctggcccagcccaagcaggagaccactgggagcagcagggaggaggctgcctgtgactccttggctccctggtcccctggtctcgaactctgccctccaagcaaaggccatgggttcctggaggctcctaggaaccccagcgttggtgggttgggatggccccttctgcagcctggcctccccgatctcccctttcacagggcccccggctcggcctgggagatggcagcggcgtgttgaacaatcgcctggtgggtttgagtgtgggacaaatgcatgtcaccaagctggctgagcctctggagatcgtcttctctcaccagcgaccgccccctaacatgaccctcacctgtgtattctgggatgtgactaaagggaccactggagactggtcttctgagggctgctccacggaggtcagacctgaggggaccgtgtgctgctgtgaccacctgacctttttcgccctgctcctggctttcccgggagaggttcaagtcagaagatgccccaaagatccacgaggcctcgctcggcagcctgttcctcctgaatctggccttcttggtcaatgtggggagtggctcaaaggggtctgatgctgcctgctgggcccggcgcgctgtcttccactacttcctgctctgtgccttcacctggatgggccttgaagccttccacctctacctgctcgctgtcagggtcttcaacacctacttcgggcactacttcctgaagctgagcctggtgggctggggcctgcccgccctgatggtcatcggcactgggagtgccaacagctacggcctctacaccatccgtgatagggagaaccgcacctctctggagctatgctggttccgtgaagggacaaccatgtacgccctctatatcaccgtccacggctacttcctcatcaccttcctctttggcatggtggtcctggccctggtggtctggaagatcttcaccctgtcccgtgctacagcggtcaaggagcgggggaagaaccggaagaaggtgctcaccctgctgggcctctcgagcctggtgggtgtgacatgggggttggccatcttcaccccgttgggcctctccaccgtctacatctttgcacttttcaactccttgcaaggtgtcttcatctgctgctggttcaccatcctttacctcccaagtcagagcaccacagtctcctcctctactgcaagattggaccaggcccactccgcatctcaagaataggaaggcacggccctgcaatatggactcagctctggctctctgtgtgaccttgggcagctccgtgcctctctctgtactccctcagtttccttctctgtacaatgtggctggggagggagaggatgggaccaggttggaccacgtggcatcagaggtcccatccagatccaactataggtccaagagtccacgtaagcaggtttgcaaggctctaaagttcctatagtcctgagaccccctgccagcaaagagtgacagtcacctccatgccctgccctcattgcaaagccctcactcaccttctggtctcagcaagggaggagagtctgttgctggcatagccctggaaggagcccccagcctctcccctcctcctccttgtcactggcctcccacaactccccttctggctgcctgtaaccttgaggggcattcaggaggccagcgttccctcaggcactgggggtttgttttggggggtgggagttgatcctcccacccagtctgcccctggtctctgcccatccaatcagagcccaccctcctggaagagacccccgtgttcagagtgctggcagccctgcacgtgtccagggacactgcatttcaaagaaccactgagtgggtgagctaccttgggcaaaccccccactcctgactctgactgccacgtgggtggcccgacctctgacctgctgtcatcgtagaggtagaaagcaaacaatctggggctcagcacacctgggggtgctcccactcattcagtgtgtggggcccctgagcagaggctgggcattgcccctaggacctgagctcctagagaacaaggacctgggtggcctcgcttactgttccagcccaggccaagcacagggtctggctcgtggcaaaccttgaataaatatttgttggctgaaaaaaaaaaaaaaaaaaaa

SEQ ID NO: 15 - DNA, 1214 bp, Homo sapiens
ccgggtcgacccacgcgtccgcgaggaccagctgtcctggttcgctgccctggtcaagtgcctgcccgtcctctgcctggctgggttcctgtgggtcatgtccccaagcgggggctacacccagctcctccagggagcccttgtgtgctcggctgtgggggacgcttgcctcatctggccggcagccttcgtccctggcatggccgcctttgccaccgcccacctcctctacgtctgggccttcggcttctctcccctgcagcccggcctgctgctgctcatcatcctggcccctggcccctacctcagccttgtgctccagcacctcgagccggatatggtcctgccggtggcagcctatgggctgatcctgatggccatgctgtggcgcggcctggcccagggcgggagtgccggctggggcgcgctgctcttcacgctctctgatggcgtgctggcctgggacaccttcgcccagcccctgccccatgcccacctggtgatcatgaccacctactatgctgcccagctcctcatcacactgtcagccctcaggagcccggtgcccaagactgactgactagggagcttgaagggccggtgttcaggccctctcctcctgcaaggacctgggcctcccagcccagcccagcctgagaaataccctcagcagcgaagcttcctgacgcctgtctgcaggcgccgctgccgccgtcgcttctggctgaagacgtttgaggacgatttgcggaattccaagtccactactgggttccagctgccttcccccggttctgactccagatccctggctcctcagccaggcccacatggagccctcccagccaccagcctgcctccatgttcactgtcggccccacagcctgcccgccccctgctgctgctctgaatccgttttccctgtgggtgtggaaccgtagatgttgctgttaccgtaggagaggcctcggggagggtcatgattgtgataaaccatcgcggttaatgacagcagaaggttctttgtcgctccccatggaccaggcctggtgcccagtgggaccctccatggccctctggtggggggattcggggggataaagtgaggattgtgcagaactgaaaaaaaaaaaaaaaaaaaaaaaaaaaaaaaaaaaaaaaaaaaaaaaaaaaaaaaaaaaaaaaaaaaaaaaaaaaaaaaaaaaaaaaaaaaa

SEQ ID NO: 16 - DNA, 896 bp, Homo sapiens
ccacgcgtccgcgaattctgctcagctcgctttggcagcttggtgggcggtgggcgcgggtggcggaggcgattgaagctgctggcccagcatgtggtgcgcgagcccagttgctgtggtggccttttgcgccgggcttttggtctctcacccggtgctgacgcagggccaggaggccggggggcggccaggggccgactgtgaagtatgtaaagaattcttgaaccgattctacaagtcactgatagacagaggagttaacttttcgctggacactatagagaaagaattgatcagtttttgcttggacaccaaaggaaaagaaaaccgcctgtgctattatctaggagccacaaaagacgcagccacaaagatcctaagtgaagtcactcgcccaatgagtgtgcatatgcctgcaatgaagatttgtgagaagctgaagaagttggatagccagatctgtgagctgaaatatgaaaaaacactggacttggcatcagttgacctgcggaagatgagagtggcagagctgaagcagatcctgcatagctggggggaggagtgcagggcctgtgcagaaaaaactgactatgtgaatctcattcaagagctggcccccaagtatgcagcgacacaccccaaaacagagctctgatctccaatgccagcacatttgtgacttgtaattagagagaaaagtgactctctaggatatggacatgttgattaaggataactgggaatgcatcatatttggtctcatgaaaaaaaaaaaaaaaaaaaaaaaaaaaaaaaaaaaaaaaaaaaaaaaaaaaaaaaaaaaaaaaaaaaaaaaaaaaaaaaaaaaaaaaaaaaaaaaaaaaaaaaaaaaaaaaaaaaaaaaaaaaaaaaaaaaa

SEQ ID NO: 17 - DNA, 1299 bp, Homo sapiens
ggcacgagcaaccgcctggggcccttgcccttctggcttctctactgctgccccgtctgcctgcagttcttcaccttgacgcttatgaacctctactttgcccaggtggtgttcaaggccaaggtgaagcgtcggccggagatgagccgaggcttgctcgctgtccgaggggcctttgtgggggcctcgctgctctttctgctggtgaacgtgctgtgtgctgtgctctcccatcggcgccgggcacagccctgggccctgctgcttgtccgcgtcctggtgagcgactccctgttcgtcatctgcgcgctgtctcttgctgcctgcctctgcctcgtcgccaggcgggcgccctccactagcatctacctggaggccaaggggaccagtgtgtgccaggcggccgcgatgggtggcgccatggtcctgctctatgccagccgggcctgctacaacctgacagcactggccttggccccccagagccggctggacaccttcgattacgactggtacaatgtgtctgaccaggcggacctggtgaatgacctggggaacaaaggctacctggtatttggcctcatcctcttcgtgtgggagctactgcccaccaccctgctggtgggcttcttccgggtgcaccggcccccacaggacctgagcaccagccacatcctcaatgggcaggtctttgcctctcggtcctacttctttgaccgggctgggcactgtgaagatgagggctgctcctgggagcacagccggggtgagagcaccagtatgtcgggcagtctaggctctgggagctggtatggtgccatcgggcgtgagccgggctggtatgggggcagccagacgaagaccactcctctgctcttctcccaggtgccaggaccaggcggccaccaccacagtctctactccaccccacagacgtgatccccctccctcccccacagaatacccaggccccagtccccctcaccctaggcccctgtgccaagtttgtctgccgcttcttgcccaggatcctgggggtcgtggctaccccctcctctggccggctccttgctgctcctgtcatagtgagcttgtgccgtccccctaggatggggggcatggccctggctgccagatgcccacagcaccctggcatgacctgccacctctgcttccacaccggagccagctacctctcctgtgcctgccactcaataaacagtgtctgcgccccacaaaaaaaaaaaaaaaaaaaaaaaaaaaaaaaaaaaaaaaaaaaaaaaaaaaaaaaaaaaaaaa

SEQ ID NO: 18 - DNA, 1796 bp, Homo sapiens
ggcacgaggtcggagaagagataccctcagccacggggccagaagaagaagaaagtggtgaagtatggcatgggaggaatgatcatcgtcctgctcatctgcattgtctggtttcctcttctcttcatgtctttgatcaaatctgtggctggggtcatcaaccagcccctggacgtctccgtcacaattaccctgggagggtatcagcctattttcacaatgagtgcccaacaaagccagttgaaaattatggaccagcagagctttaacaaatttatacaagctttttctagggacaccggtgctatgcaatttctggaaaattatgaaaaagaagacataacagtagcagaactggaaggaaactcaaattctttgtggaccatcagcccacccagtaagcagaaaatgatacacgaactcctggaccccaatagtagcttctctgttgttttttcatggagtattcagagaaacttaagtctgggtgcaaaatcggaaatagcaacagataagctttcttttcctcttaaaaatattaactcgaaagaatatcgctaaaatgatagcaggcaacagcacagaaagttcaaaaacaccagtgaccatagaaaagatttatccatattatgtgaaagcacctagtgattctaactcaaaacctataaagcaacttttatctgaaaataatttcatggatattaccatcattttgtccagagacaatacaactaaatataacagtgagtggtgggttctcaacctgactggaaacagaatatacaatccgaactctcaggccctggaactggtggtcttcaatgacaaagtcagtcccccaagtctggggttcctggctggctatggtattatgggattatatgcttcagttgtccttgtgattgggaaatttgtccgtgaattcttcagtgggatttctcactccatcatgtttgaagagcttccaaatgtggatcgaattttgaagttgtgcacagatatttttttagttcgagagacaggagaactggagctagaagaagatctctatgccaaattaatattcctatatcgctcaccagagacaatgatcaaatggactagagaaaaaacaaattgaaaccttagaacacagactgcaaataatgttaacatttgaattttttttaaaagcacaatattctcataagagctaagcatttctagttcgacggaaatggtttgtttctcttctgataggtagacaaaaggagctgatatccttctgcagtaaaagctaccttgcaagttaaggcactgttgaaaatgttatttgtaactccatttctctgaaatcagggctacttgctttatgttttagtcaacagtgtctcgcattctgattgatcatgtgaaggaatcatttatgggccccgtccctaagagaaacagaagaggagtcagaaagaaagatgcctgtgttttcctctgtggggcccgtgcacttcctggagagatgctacaatgcaatatacagcgctccatccccactggggaagctgctgtgatgagactagatgagccttcaacacactcagaaaatgcaacagcaatagggggcagacagctcctacctgtgtttctaggagcaaaagagagggaactaattgcccgtgaagacgccagtggaaggatcagcctcattctaagcaaaaacatagtattagtgatactcttactgccttatcttaaccaaggactaataggatacctttccattaaacaccagtgacttctcaggaaaaaaaaaaaaaaaa

SEQ ID NO: 19 - DNA, 1881 bp, Homo sapiens
  SITE (1865): n equals a,t,g, or c
  SITE (1873): n equals a,t,g, or c
gaattcggcagagggtgaggcccaggtagcgtttgcaatccagccccaccgtcacctcttttcttggacttctagttttcctcacccctattgccttcatccttttacctccgatcctgtggagggatgagctggagccttgtggcacaatttgtraggggctctttatctccatggcattcaaactcctcattctgctcatagggacctgggcactttttttccgcaagcggagagctgacatgccacgggtgtttgtgtttcgtgcccttttgttggtcctcatctttctctttgtggtttcctattggcttttttacggggtccgcattttggactctcgggaccggaattaccagggcattgtgcaatatgcagtctcccttgtggatgccctcctcttcatccattacctggccatcgtcctgctggagctcaggcagctgcagcccatgttcacgctgcaggtggtccgctccaccgatggcgagtcccgcttctacagcctgggacacctgagtatccagcgagcagcattggtggtcctagaaaattactacaaagatttcaccatctataacccaaacctcctaacagcctccaaattccgagcagccaagcatatggccgggctgaaagtctacaatgtagatggccccagtaacaatgccactggccagtcccgggccatgattgctgcagctgctcggcgcagggactcaagccacaacgagttgtattatgaagaggccgaacatgaacggcgagtaaagaagcggaaagcaaggctggtggttgcagtggaagaggccttcatccacattcagcgtctccaggctgaggagcagcagaaagccccaggggaggtgatggaccctagggaggccgcccaggccattttcccctccatggccagggctctccagaagtacctgcgcatcacccggcagcagaactaccacagcatggagagcatcctgcagcacctggccttctgcatcaccaacggcatgacccccaaggccttcctagaacggtacctcagtgcgggccccaccctgcaatatgacaaggaccgctggctctctacacagtggaggcttgtcagtgatgaggctgtgactaatggattacgggatggaattgtgttcgtccttaagtgcttggacttcagcctcgtagtcaatgtgaagaaaattccattcatcatactctctgaagagttcatagaccccaaatctcacaaatttgtccttcgcttacagtctgagacatccgtttaaaagttctatatttgtggctttattaaaaaaaaaaraaaaatatatagagagatatatatctatgccagaggggtgtcttttttaaaaattcttcttcattgctgactgaaactggcagatgattgaccagtatcctttgaccatctgcactttatttggaaggaagcaggggctgtccaccctgaaaaagagtgactgatgacatctgacttttgtcgatgggacttctcaagaagccattccttggagcttctgttacagctgtaaaccaaagtggagctggtgcttcttgggagcctcgccttacaactagttcctgcctttcgtccagtaccaagtcccccgttgcttctggtcagcccacttgtagacttccaggggacacatctttattctgtttcaggaaaccagtcacracacgtccacatatgtatttgtgtatgttaatgccagtatcacatcacccatgaaagtcgtgggcagttcargagatacctgscttcgtctttgktctttgttgccttaggttcttcagagaaagatcmcaacaaaaaatgtacmctgtcgtttacagctawaagngatttganttgttttt

SEQ ID NO: 20 - DNA, 2618 bp, Homo sapiens
  SITE (2597): n equals a,t,g, or c
  SITE (2599): n equals a,t,g, or c
ccgggtcgacccacgcgtccgattcatagcagtatggactcatggatacatattttattctgtgggcaatacccgttactatcattatttgtttttcttggcttgaatattctcagacttgggctttgggtgcttcttgtagtttgccgcaatgcccttttgatgtgatgctatcattatttttagtacatccttactttccaacagtatgggatcatctttgttttccccatcccagtcctgaaagtagccctttctccaagtgttcactggttgcttggttggagaatggtgcataggaaccaagatctgagtgcaagggtgctcttcactgttgggatgtcattgcttctgggtgtgttggagccagcaaatatatatatgtacactaattcatgcatgcacacatttgcatttatttatacatctatccatctgcgtgtgtatacgtgtgtgtatatgtgttaccatgagttaataccaattactctgatttcaatccaacacaatgggttctttctaattatttttaatttctctcaaaatcacttcttctggttcttccagaaaatgagctcttcacctagcttaagaatgtagagatgtcgtgtatggttgggcaggttgttcactgtccaagggtgttccagctgaggagagcgatgggagctgaaagcatccatgctctactccctaagctctgcactctaacatgtgctctgggtccaccagagtaagggatgccctcttttcacttgtgcaaatgcactgggtgagctagcaacagacctggtcgactgctgtctcgggatatttttgtgtttacttgtgaaacacccaggcttgggctggattcccccagaggcagattgtgagctgaggatttgagtgcgaggagtattttgggatgtgattccaggaacctcccagagagaagcagtggggagtcaggcaggaaagaaagcatgcgtcagggagctggttactactgggccaccgaggctccatcccagtaaggaaccctggaagacgggaggaacgcaccttggagttgcttccctaagggatcaacttcagttggtcgccactcaaggctcctcctgaggggagcaggcacagagtccctggcacttctggccctgagtgcccaggggatgagtgcgtgacattgacggcttctgctgtcctctgtctcctgctttccccgtgggatgaactagcttgagaggcacaagattcctgagcaggcagagggactctgtaggagtctcagagctcctgaggctgcaccctcgccctggagccccgtgaaatcttcaattttgggttttatgagcttcacaaaccttccaggggcctctccggctccggatggggtgcgttggaggcctggtgcccacgtgtctcctgggccctccacctgtgccccgcctgtttgcacagtgtgcgtgagctgagcacctgagtttgctctttgaatcaagtgtttaactcactcacggtaatagtggctgataattcttgagctaacacaccttctactttgcggcctagccttgtttgcctttcagccctggtttattatcttccatcggatgaagcttaggagcaccagcgctgcctagggaaaccctggcccctccttccctgggatcatctgggtcccccagggctcaggctttacaacccctgctgcttggttacccacctcccacctggggcccctgacagatcaggggacaagcagatagagggctcaccagtgcagtccagtgtatgctgccgggcgggccggagcagagtgagtcagatttggctttttataatcatccaggtgccagggtgggcacgcgtcctgggtcatccttccagcgagggctcacatcatagcctgtcaccagcagtaattcagcaggagggtttagtttcctccctatgggatcagcgagggcagctgtctaagccccaggcacactgcctagggcggacgtgggggtgggggccgtcctcctagggctgccctgcctcttggcaggtgatcagccttcacctccttgtgtggtttaggggggctgcctcctgtctatgtcagagggcttctcagaaacaggcaccgctgtaggggcagcaagatgacttcacttggaaaatggaatgtacttaaacgagatcaagccacctcgtggagaagccattcccttccaatttgttttaatcctgctgattattgcaaagagaaagacttagcctggtgctaatgagtctttaatgcctctgaggacttcctaagttttccttttttttctaaacaagaaaagttaagcctcaggctgttcatccttctagttggaatttaataaccgtgttttgttttcatagaatttacctttggagttgtttattcatggcagggcctcctggttttccattttggggagtgataggaagttttccattaaattaatttattgtatatatttttttacagtgagtccttaatatattttgtaggtaatagtatgggtgaggttggcaaactatggccctgggctaaatctagtgtatagcatgtttttgtcaataaagctttatcagcncncaaaaaaaaaaaaaaaaaa

SEQ ID NO: 21 - DNA, 1549 bp, Homo sapiens
ctgcaggaattcggcacgagtgactctattcatgctattttagatagcatgaattggtcagcttcatagtgtatattttctctattccattaaatttaattaatttcatttgattttattctgttcttcaggaatcttagtttttatatagtccaactcatgtactctgcttccgtcattaagaattcatagtgggagaaataggctgttgccttttctctagaatgcatggggcaaggctgtttgtttgtttgtttgtttgctttagacagtcttgctatgttgcccaggctggagtgcagtggcacaatcacagctcactgcaacctctgtctcccgggttcaagagattcttctgcctcaacctcccgagtagctgggattacaggcacatggcaacatgcccctggctaatttttgtatttttagtagagatggagtttcgccatgttggccaggctggtcttggactcctgacctcaagtgatctgcctgccttggccttccaaagtgctgggattacaggactgagccaccacgcctggccagggcgttttcttaaaaaagtgattgaaatctgctcatgccctgtgccacgtgggtctcacgcaggtctgttctctgctccaggtctgccatgtgaatctggaggggcagccgttctactccaagaaggacagacccctgtgcaagaagcacgcacacaccatcaacttgtaggcggccaaggccgcctgtgctgacgaggcccggagctgctcctgctgctggcaacaaaggattcgggaggctgatgtttcttctgaggggaatggggagagagaggaagcgactgagccctttggaagtataattttaggttttttcttctgtacacagatcgtgcatttgcatagttcagactaggagccaaatgaagactcaaaaccaagctagttattaatccaagactggaattgtacttcagacatttagagcagaattccaagaactcaaaagtgaaaagcaacaagcagctttcccaaagcgatacacttgctttggtcaccagaggaggacagagcttagagcagctgtggagaatctgaagcattctgcggagttcttaagcgctcccctggcaaacaaattgaagtgccaaacagcactcgctgcagggtatttttagagtcatagctgagagcttgttagctaagacccattgggctttcctcaccaaaaaaggaagtgttattccattactagcgtcatggagctacctctgcgcatcagacttcagaccttgaacaaacttaaaaccttcttgggagcccggacgtccaaagagatgtcttctgggagccactgggcaattgccagggctccaggaagggctctggctcaggttgcagacagctgagaaaagatggccctgtcagccaccctctctcagtctgaaacatccaacatccccagaaggcttagctcctttttgaattgtgatgggaaagtagagttgggtttttcctcgtgccgaattcgatatcaagcttatcgataccgtcgacct

SEQ ID NO: 22 - DNA, 3239 bp, Homo sapiens
ccacgcgtccgggaggcctgagagccgggcaagggctgtcgcacatgcgccttgagggaagatggcacctgccggctgctgctgctgctgctgcttctggggcggcgctgtggccgccgcgggcgccgcccggcgtgtcctgctgctgctgctgctgggggtcctgtccgcccggctgcggccaggcgccctggccaccgagcactactcgccgctcgccctgctcaagcaggagctgcagcaccggcagcagcaggaggccccggcgggcggcggcggctgcagcccgcagtccggggactggggggaccagtactctgccgagtgcggcgagtcatcctttttgaacttccatgactcagactgcgaacccaagggatcatcaccctgtgactccttgctttccctcaacactgagaagattctgagccaggccaagtctattgcagaacagaagagattcccgtttgccactgataatgacagcacaaatgaagagttagctattgcttatgtcttgattggcagtggtctgtatgatgaagcaatacggcatttttcaacaatgcttcaggaggagcctgatctggttagtgcaatttatggccgagggatagcctatggaaagaagggactacatattctgtcccctctgggacgaattaatgaagcagtgaatgacctcactaaagctatccaactgcagccctcagcacggctgtacagacatcggggaaccctgtacttcatatcagaggactatgcaacagcccatgaagactttcagcagtccttagaactgaacaaaaaccagcctatagctatgctatacaaaggtttaactttctttcacagaggacttctgaaggaagctattgaatccttcaaagaagctttgaagcagaaagttgactttattgatgcatataaaagtctagggcaggcatatagagaactgggcaattttgaagcagccactgagagctttcaaaaggcactgttgctcaaccaaaatcatgtgcaaaccctccagctccggggaatgatgctctaccaccacggcagcttacaggaagcccttaagaactttaagcggtgtctgcagctagagccatataatgaagtgtgccagtatatgaaagggctcagccatgttgccatgggacagttttatgaagggataaaagcacaaacaaaagttatgctgaatgatcctctcccaggccagaaggctagccctgagtatcttaaagtaaagtatctccgagagtattctcgatatcttcatgcacaccttgataccccccttacggaatataacattgatgtggatctgcctggaagctttaaggaccactgggctaaaaatttgcctttcctcatagaagactacgaagagcagccagggttgcaaccccacataaaagatgtgttacatcagaattttgagagttataagcctgaagtacaggagctgatttgtgtggctgatcgtttgggatccctgatgcaatatgaaacacctggtttcctgccaaacaagagaatacacagagctatgggtttggccgcattggaggtcatgcaagccgtgcagcgtacatggaccaactcgaaagttcgaatgaatgggaagacacggttgatgcagtggagagacatgtttgacattgcagttaaatggagaaggattgctgacccagaccagcccgtgctgtggttagatcaaatgccagcacgaagtcttagcagaggttttaacaaccacattaatttaatcaggggacaggtgatcaacatgagatacctagaatattttgagaaaatacttcattttattaaagacagaattcttgtttatcatggagctaataatcctaaaggattgctggaagttcgggaagccctggaaaaggtacacaaagtagaagaccttcttccgattatgaagcagtttaatactaaaacgaaggatgggttcaccgtgaacacaaaagttcccagccttaaagaccaagggaaggaatatgatggattcacaatcacgattacaggagacaaagttggcaatatattattttctgtggaaactcaaaccacggaagaaaggacacaattatatcatgctgaaatagatgcactttataaagatttgacagcaaaaggaaaagtattgattctttcatcagaatttggggaggctgatgctgtctgcaacttaatcttatccttagtttattacttttataatttaatgccactctctcgaggatccagtgtaattgcttactcggtcatcgtgggagcactgatggcaagtggaaaagaagtagcaggaaaaattcccaaagggaagttagtcgactttgaagctatgacagcccctggttcagaggcctttagcaaagtcgccaaaagctggatgaacttgaaaagtatttcaccttcttataagactcttccatcagtatcagaaacgtttccaacgttaagatcgatgattgaggtgctaaacacagactcttctccacgttgtcttaagaaactctagttctgctgctgtatttatacaagtaaagggccggacctcttgcttcttaagttatctttttaaaacatggaattataaagaaattaggtcctctattacttttgataccaatttttataggaattgaatacttgaaatcattttctttacttttctgaaccataatgaaaatcatgaaagaggctttcggggggaaaaagctacttgacttggagggaaagcgtatgtattagccggcagcctgttggttcccacttataaagtcatataactccttccttacagtaaaaaaaattttcctcaacaactaaaatataatactgaagatgaacaaaaacaaaaccaaataggagtgtttgtattcctttagagatctggatatttttcaaagacttgctttttacgcacattgtgatagagcatcttttgttgactcacgtaacctccatgtgtgggtcctttgttttattagaaccatggaagaaggttcctgggccatcagtatgtgttgcagagctcacagccaggaacacttattttgaacaatgcagacagtacttgccagagtcccaaatgctgaattattgaaccatgtttttttttcctttgttgaaaaaaataaaccagggtgatttctataaatcaccagtttttggcattgaaaaaaaaaaaaaaaaaaaaaaaaaaa

SEQ ID NO: 23 - DNA, 1433 bp, Homo sapiens
ggcacgagtgggtttcgaccccagaggtgaatgtattgttattattgttttgttgttgttgtgaatgacaagtcaaaatttgtgggttattgttgttatcgccaatagtattcttgtcattgttgcacagtacagagatgaaggaaacagattttgcaatcagatgatcctgggttctgagtccactctgccactcaccagctatatgacctccagcaatttccatcacctctcaatgcttcagtttccccatcggcaagatggttgtggggggagaggaacaacagtacagattcaccatcccaaattcaaaatgctccaaaatctaggccgggcgtggtggctcatacctgtaatcccagcactttgggaggtcaaagtggacggataacctgaggtcaggagctccagaccagcctggccaacatggcgaaaccccatctctactaaaaatacaaaaaattacctgggtgtggtggggggcacctgtaaccccagctactcgggaggctgaggcaggaaccctggaggttgaggttgcagtgagctgagatcacaccactgcactccagcctgggtgacagagcaaggctcccatctcaaaaaacaaaaaaacatgctccaaaatctgaaactctttgagccccagtgtgatgccacaagtgggaaattccacaactcatcacgtgtgatagattgcagtggaaatgcaggcacacaccacgaagtttactcagcatcctcaaaggaaatccccgtcagtagctatatatcattttctcacatgccagataggtatctctcatcttttactgttaggtacttctgtgttgaataggtggaggaaaatgattgctggttagtagtatataaattcagagtcaggaaggatggtgatgtcggctgggtgcagtggctcatgcctgtaattccaatgtgataccctaccttgtgtttaacgtgattgactctcccttagctgagagggccaggcagactctattttggcttcttcgcttgcagtctctcacccaccccccttcctcaaggacttaagctgactcccagcacatccaagaatgcgattactgataagatactgtgacaagctatatccacagttcccaggaattcgtctggttgatagcacccaaagcccccgcgtctatcaccttgtgatacatttaaagcccctgcacctggaactgtttgtttttctgttaccatttatctttttcactttcttgcctgttttgcttctgtaaaattgcttcagctcggctccctcttccccttctaaaccaaggtataaaaagaaacctagccccttctttggggtggagagaattttgagcgctagccgtctctcagtcgccggctaataaaggactcctgaattagtctaaaaaaaaaaaaaaaaaaaaaaaaaaaaa

SEQ ID NO: 24 - DNA, 2517 bp, Homo sapiens
  SITE (950): n equals a,t,g, or c
  SITE (1247): n equals a,t,g, or c
ccacgcgtccgttgtgagcaggtgaagctcatctaactaggcatttctatgatgtggctgcttttaacaacaacttgtttgatctgtggaactttaaatgctggtggattccttgatttggaaaatgaagtgaatcctgaggtgtggatgaatactagtgaaatcatcatctacaatggctaccccagtgaagagtatgaagtcaccactgaagatgggtatatactccttgtcaacagaattccttatgggcgaacacatgctaggagcacaggtccccggccagttgtgtatatgcagcatgccctgtttgcagacaatgcctactggcttgagaattatgctaatggaagccttggattccttctagcagatgcaggttatgatgtatggatgggaaacagtcggggaaacacttggtcaagaagacacaaaacactctcagagacagatgagaaattctgggcctttagttttgatgaaatggccaatatgatctcccaggagtaatagacttcattgtaaataaaactggtcaggagaaattgtatttcattggacattcacttggcactacaatagggtttgtagccttttccaccatgcctgaactggcacaaagaatcaaaatgaattttgccttgggtcctacgatctcattcaaatatcccacgggcatttttaccaggttttttctacttccaaattccataatcaaggctgtttttggtaccaaaggtttctttttagaagataagaaaacgaagatagcttctaccaaaatctgcaacaataagatactctggttgatatgtagcgaatttatgtccttatgggctggatccaacaagaaaaatatgaatcagagtcatccccctatatatgacctgactgccatgaaagtgcctactgctatttgggctggtggacatgatgtcctcgtaacaccntaggatgtggccaggatactccctcaaatcaagagtcttcattactttaagctattgccagattggaaccactttgattttgtctggggcctcgatgcccctcaacggatgtacagtgaaatcatagctttaatgaaggcatattcctaaatgcaatgcatttacttttcaattaaaagttgcttccaagcccataagggactttagaaaaaatagtaaccaacaatgaggttgtcccccagcaccctgggggagatgcacagtggagtctgttttccaagtcaattgtgttagtgntatttatgtttagagacatctttgcatgggaccatctacaggtccttataaacaatgaggtagattaggcaaaaagataaacaagttgctactctatctggcatttaagtctaattaaattgtaatttttagggcataccatgaagtatagaaatgtctgaagcttcaaaggaacagtgaaattcctttaaggtcctatatggaaacctctgttgtcattttatttatatggattgctatggcaatggacagagtgtgggattaggaggagggcctgtaacttctttataaaagtttcttagctatcctgaagatgtatagacatttttacttttttaggtattttcaacatcagaaattcaaaaaagtccccaaagattcttccagagaagccctcttttcttacaatcttatccctggctatctgcgtaaacggaatcttgaacccataataggatacatgtataaaatcttccttattaaagcagaaataaattgtacagcatcaatatcattttataatcatagggaggcttctttgtttagcatgtaatgccccctttacaggctttttgttctttgaggggtttgaacattccatgaaaaactgacagataggaaactgacaataaaagattgagctaaagatggaagcagaaagtactaggctagatagtctctaaacattaagtattttcttcctccatcttaaaagcaatgagaagccaccaaaatattttacctaatggaaacctgattgccgcatttttgtaaccaccactttggctgctacatagagaatggattagaagatgccaacaaaagattctgagcaagactgtaaatctgatcaagtgttctgatgcaggctgatatccttctgtgctaagagagatgatccttggaaaatccagagccagctccataatactttcctgctctgctggcaaatccacaagctgctggcccctggagccattcttctctcaaaactagcattcatcaatttaatgtatacgtattgatggggaataatggtcactatgaaaaccatgtgataatatggaaaaatacccatgatataatgttatgtgaagaggagaaaatgaaactggtagaactatgtgattgcaaatatatacaaatattaaaacaattatatgactttataaaatatttgtatataatgaaaactgaagcaatataaaaaataaaattagttgtgtcagggtagtaaaaaaaaaaaaaaaaaaaaaaaaaaaaaaaaaaa

SEQ ID NO: 25 - DNA, 807 bp, Homo sapiens
ccacgcgtccgcaaaatacctgagcccaggtaatttataaagcaatgaggtttatttggcttatgtttctgcaggctgtacaagcttctggtaagggcctcaggaagcttccacacacggtggaagatgaaggggagccagaatgtgcagattacatggtgagagagtggaagcaagagagaggggcaggaggggccaggatcttttcaacaatcagctcatggatgagcacagtggctcatgcctgtaatcccagcactttgggagcacaagatgggaggatcacttcagcccaagaatttaattaagaccaaccagcctgggcaaaaaagtgagactccatctctacaaaaaatcaaaaaattaaccagtcacggtggtgtgtgcctgtggtccaaactacatgggagactgaggtgggaggattgcttgagcccaggaggtcaagactgcagtgagttatgctcatgccactgcactccagcctcggcaacagaatgagacactgtcttaaaaaaaagaaaagtgaatttataaacaaaattttaaaaaatcagctcttgtaaaaactaagagtgagaactgactcattattgcaaagataacactaacctattcataagggatctgtcccattatccaaacacctcccaccaggccccacctttaacaatgggaatcaaattataaaatgagacttggtagtcaaacaaatcatatcaaaccatagcacctactctcccacttctgttcaacatgggattgaagttctttctagagcaattaggcaagaaaaaaaaaaaaaaa

SEQ ID NO: 26 - DNA, 554 bp, Homo sapiens
gaattcccgggtcgacccacgcgtccgaatttcaaaaacaacgaaaccttcttttgccccctccgcagcagtcgcctccgggctttattgcaagtttacggttccatacaagtaaatccgaaaaaaagtgtgtgtgggggggtccacaccactaattattatggcgaggaagataaagaagacatggacagaaggcggatggctctgcggcctggctcccgcagaccgaccgccttcttcttccattcgagatggctcgtaccgaacctccttgccttcttcctgggtctctcgggggctggaccaatacatctgccgatgccctggccgaatggcaggcgacatcgggtcctggacccccacacgcagctcagtacccacgaggccccaggccgctggaagcctgtagctccgcggaggatgaaagcctgcccgcaggttctcctggagtggtgagcctctgtcggaagggggcgcccacgtctttttaatgggtcctaacacaccagtggaataaatctctaagattccacaaaaaaaaaaaaaaaaaaaaa

SEQ ID NO: 27 - DNA, 1319 bp, Homo sapiens
ggcacgagtttcagggcaattttatttcctctgagagcttgtggtcacctctatgccagtgattaccaaactaaatctctagtcttggcttttctcttaaatctataaatctattccacatttctatcctcgtgatagacttttttgggatggagtttctccaactcaaacctattttaccacctttccttcaaagcttgctcctcttactaatttctcagtgtctgctgttggtgccactattttctcagagataaactttggagttctactaggtgcctcatttctctcacctgtcacatcctgtcagtggccaatgatgtccattcactgtgtacagcctctcctcccattatttttgccatcgtcttatttcaagcaattcttattacttccctggacttttggagtagccctctaattggtttacagtctccaattgtttttcctaatacatcttataaaatactgatgacttttcctaaaaccaatcatgcgaaacctcagcctaaaattcttcatggagtttgattatctactgaagaaaatgcaaacttagcgtgacattccagattttcctggtccccgcctacctttctaattttatctaatctctacctttaattcttggtttatacctttctgataacagtcactgttttcagtagaagctgaaaagacactaacattttgttaggaaatgctaaatgccttatatatgtcacttaattgcaagcataggtaagataggttttattcccattttaaaggtgaagtaactgaggtttcagagagttcaggttaatttgtccaagatcatacaacttgcaagtagagcaatcaaggttggttgattataatatccacatgctttctgtcacgttgtgttaattctttgtgtacatgtcattttcccattgcttaactttggttaatcttaaaagaaggattgctgaatcaaagtatatatccatttaaaatgtgacacacattttcaaactgccttctagaaaggttataccaggctaggtgcagttgtctcatgcctgtaatcctagcactttgggaggctgaggtgggcggacagcttgagctcaggagttcaagaccagcctgggcaacatggtgaaaccctgtctctgtaaaaaatacaaaattggccggtcgtggtggtgcatgcctatagtcccagagattgaggtgggaggatcgcttgagcctgggagatgaaggttgcagtgaagctgagattgcaccactgcaccacagcctggtgacagagtgaggccctgtctcaaaaaaaaaaaaaaaaaaaaaaa

SEQ ID NO: 28 - DNA, 1487 bp, Homo sapiens
ggcacgagccccgtccaggttcatgttcctcttatttctcctcacgtgtgagctggctgcagaagttgctgcagaagttgagaaatcctcagatggtcctggtgctgcccaggaacccacgtggctcacagatgtcccagctgccatggaattcattgctgccactgaggtggctgtcataggcttcttccaggatttagaaataccagcagtgcccatactccatagcatggtgcaaaaattcccaggcgtgtcatttgggatcagcactgattctgaggttctgacacactacaacatcactgggaacaccatctgcctctttcgcctggtagacaatgaacaactgaatttagaggacgaagacattgaaagcattgatgccaccaaattgagccgtttcattgagatcaacagcctccacatggtgacagagtacaaccctgtggcctccccagagtatgaagagaacatgcacagataccagaaggcagccaagctcttccaggggaagattctctttattctggtggacagtggtatgaaagaaaatgggaaggtgatatcatttttcaaactaaaggagtctcaactgccagctttggcaatttaccagactctagatgacgagtgggatacactgcccacagcagaagtttccgtagagcatgtgcaaaacttttgtgatggattcctaagtggaaaattgttgaaagaaaatcgtgaatcagaaggaaagactccaaaggtggaactctgacttctccttggaactacatatggccaagtatctactttatgcaaagtaaaaaggcacaactcaaatctcagagacactaaacaacaggatcactaggcctgccaaccacacacacacgcacgtgcacacacgcacgcacgcgtgcacacacacacgcacacacacacacacacacagagcttcatttcctgtcttaaaatctcgttttctcttcttccttcttttaaatttcatatcctcactccctatccaatttccttcttatcgtgcattcatactctgtaagcccatctgtaacacacctagatcaaggctttaagagactcactgtgatgcctctatgaaagagaggcattcctagagaaagattgttccaatttgtcatttaatatcaagtttgtatactgcacatgacttacacacaacatagttcctgctcttttaaggttacctaagggttgaaactctaccttctttcataagcacatgtccgtctctgactcaggatcaaaaaccaaaggatggttttaaacacctttgtgaaattgtctttttgccagaagttaaaggctgtctccaagtccctgaactcagcagaaatagaccatgtgaaaactccatgcttggttagcatctccaactccctatgtaaatcaacaacctgcataataaataaaaggcaatcatgttataggaaaaaaaaaaaaaaaaaaaaaaaaaaaaaaaa

SEQ ID NO: 29 - DNA, 1889 bp, Homo sapiens
gaattcccgggtcgacccacgcgtccgatggggctgacgtcaactaccagagcaaagaagggaaaagtcctctgcacatggctgcaatccatggccgtttcacacgctcccagatcctcatccagaatggcagcgagattgattgtgccgacaaatttgggaacacgccactgcatgtggctgctcgatatggacacgagctgctcatcagcaccctcatgaccaatggcgcagataccgcccggcgtggcatccatgacatgttccccctgcacttagctgttctctttggattctctgactgttgtcgtaagcttctttcctcaggtcagttgtacagcattgtgtcttcactcagcaatgagcatgtgctttcagctgggtttgacatcaatacacctgacaaccttggccgtacctgtcttcatgctgctgcttccggagggaatgttgaatgtcttaatttgctgttgagcagtggagctgacttgaggaggagggacaaatttggcaggaccccactgcactatgcagctgctaacggtagctaccagtgtgcagtaacattggtgactgctggggcaggtgtcaacgaggccgactgtaaaggctgctctcccctccactacgctgccgcttctgacacttacaggagagcggaaccccatacaccttccagccatgatgccgaagaggacgagccactgaaggagtcccgcaggaaggaggccttcttctgtctggagttcttactggataacggtgcagacccctccctgcgggacaggcagggctacacagctgtgcactatgcagccgcctatggcaacagacagaacctcgaactgctcttagaaatgtcctttaactgcctggaggatgtggagagcaccattccagtcagccctttgcacttagctgcctacaacggtcactgtgaagccttgaagacgctggcggagacgctggtgaatctggacgtaagggaccacaagggccggaccgcactcttcctggccacggagcgcggctctactgagtgtgtggaggtgcttacagcccacggcgcctctgccctcatcaaggagcgcaagcgcaagtggacacccctgcacgctgctgctgcctctggccacactgactccctgcacttgctgatcgacagtggggaacgagctgacatcacagatgtcatggatgcctatggacagaccccactgatgctggccatcatgaatggccatgtggactgtgtacatctgctgctagagaaaggatccacagctgatgctgctgacctccggggccgcactgccctccaccgcggggcagtgactggctgtgaggactgcctggctgccctgctggaccacgacgcatttgtgctgtgccgagactttaagggccgcacgcccattcacctggcctcagcctgtggccacactgcagtactgcggaccctgctgcaggctgccctttccacagatcccctggatgccggggtggattacagcggatactcgcccatgcactgggcctcctacactggacatgaagattgtctggagttgttacttgaacacagcccgttttcgtacctggaaggaaaccccttcactccttcactgtgcagtgattaataaccaagacagcaccacagagatgctactgggagctctgggtgccaagattgtgaacagccgagatgccaaaggacggacccccccccaatcggactgccaaattctccggtttgccccgggatattatagaaaattatttgtatgaataatgaaaataaaacacacctcgtggcaaaaaaaaaaaaaaaaaaaaaaaaaaaaaaaaaaaaaaaaaaaaaaaaaaaaaaaaaaaaaaaaaaaaaaaaa

SEQ ID NO: 30 - DNA, 1192 bp, Homo sapiens
ccacgcgtccggtgaatatatgtgtgagcagatatggctataaagacctatagcttttgcactttatgcatatataatcaatcctttctagttcagtgaattgaccccatccacaggctgattcatctttgtgttaaggggcaaatgaaacggtatattatttctttgcagtctcctctcagtcattcatcaatgtggccagcttatctactcccaattatgttgttgatacatctccaagccatctgtcatcagatcaaaaagcagcaaacagagggtcagtcacaggatgttctgacacaccattgtaactttttgttagagatgatcccatttagaaaaagactggtagaaattggagtgaaaggaaccctacagattagcccagttctctcttattttcagctttacagacaagaacaatttaaatctaaagaatttagtagattccttcagtgtcacaaagctgtttcatgaaagaatcaagattataacctggatattctgactcctggcccagtgctttttcttactttgtagctacactttgaagtaagattcaaactgttatccactcaattgccttattcctgaggatgtagtgaaggaagaaaaagttttctggaattccgtaaattatattttaagcttatttcttcaaaattattttcatatatcacagatatatcattggaagatataatttgcatatatgttcattatcagtgttcctaatttggtattacatgtattctatttttttctgaatgatagcatgaaaagtgtcaaagtggtttgtccgctagcgtctgtctgcagaactttcaggatgactattaattcctctcagatgtcatttttgagtggtccaagcctgctgttttgaacccacagcagtggagatttgtattcttatttacagttgtgtactataaagtgtgtgttacataggttttgtgtaataattatttgtaaatattatttagatttgtatttagacatgatttatatctaatatagatacaaagtctgtgtctaaatattatttaaagaagtgatttttcattctcttggattctttccagtgtggtgccttttatatgcctcacatagtctccttgttctcctactaatattcccaagctccatatgccaattaaagaagaacaaaaaaaaaaaaaaaaaaaaaaaa

SEQ ID NO: 31 - DNA, 1162 bp, Homo sapiens
tcgacccacgcgtccggttgttcccctggccaactccacaggtttgaacctggcattctggacaccagctatgcctcctccatttctcagaaaacctttgatcttgtgtgtctttcttcctactgaagggaattgtgggggcagttctttggccttcttgctgaactttgctggaaatagcccacaatttttatcagaggttagaactgtacattatcagagagactggacactttatcccctagcaaagtgggagaagattttaccagctcattccactccaccctggccttcccccaccccccatccccagcagcatttccatggaaatccagatggtcgtgtagtgttatggctctcttgtgatagactggccttcatattggagagctagggagagcccctgggagggagagagataaggcgctatctgccttcaatcagaaccttcggtttaaaatcatctaagagtctatacttgtgtgtacatacgtatttatttttatttatttttatacaattccattggcatggtccttcaccgaccctatgatttgcactttttatttctatgtgtgccacacacaatgcagtattaatggcaaccaggtaaatattgatttattttttaaagcttttcttcagtgttttgtcaaccatttcaaagtgtctcccaaaaaaggatgctgaagagcaattgctcccttaagcaacagattcatatttaccctgggttaatacaacaaaaggcctgtataattgtcttttcattgttaacacccaaaatagcatctatctagacagtatccccaaagaatttggaaaatctgatggtgtgagcagcagccgttagtatcagggtttcccattcttggacagtccgaggctgtgacctgttagataattagattatacttgaactggaccagagtttgttttttgaatttatgagaaaaaccaaaacactaagttaagtttgaacttgtaaagtattgaaatttgttgagtgtcctataaattgtcactacttttcctgatctgtataactgactgcaaagtgtttgtttttacaaaagagaaaagaaaagatttttaataaagagaatttgaaagctgaaaaaaaaaaaaaaaaaaaaaaaaaaaaaaaaaaaaaaaaaaaaaa

SEQ ID NO: 32 - DNA, 2799 bp, Homo sapiens
tcgacccacgcgtccggagaagactggagctccgaggagctgcatctgcggcaacctgtgtgctgacgctacgtgcctcctggctccgacgtagctcgcagctccccagtctcactccattccttccccacctggcgcgcacctgctcaagaccagggtcctgccaagcgctaggagggcgcgtgccaggggcgctagggaactgcggagcgcgcgcgccatggggccgccgcctggggccggggtctcctgccgcggtggctgcggcttttccagattgctggcatggtgcttcctgctggccctgagtccgcaggcacccggttcccggggggctgaagcagtgtggaccgcgtacctcaacgtgtcctggcgggttccgcacacgggagtgaaccgtacggtgtgggagctgagcgaggagggcgtgtacggccaggactcgccgctggagcctgtggctggggtcctggtaccgcccgacgggcccggggcgcttaacgcctgtaacccgcacacgaatttcacggtgcccacggtttggggaagcaccgtgcaagtctcttggttggccctcatccaacgcggcgggggctgcaccttcgcagacaagatccatctggcttatgagagaggggcgtctggagccgtcatctttaacttccccgggacccgcaatgaggtcatccccatgtctcacccgggtgcagtagacattgttgcaatcatgatcggcaatctgaaaggcacaaaaattctgcaatctattcaaagaggcatacaagtgacaatggtcatagaagtagggaaaaaacatggcccttgggtgaatcactattcaatttttttcgtttctgtgtccttttttattattacggcggcaactgtgggctattttatcttttattctgctcgaaggctacggaatgcaagagctcaaagcaggaagcagaggcaattaaaggcagatgctaaaaaagctattggaaggcttcaactacgcacactgaaacaaggagacaaggaaattggccctgatggagatagttgtgctgtgtgcattgaattgtataaaccaaatgatttggtacgcatcttaacgtgcaaccatattttccataagacatgtgttgacccatggctgttagaacacaggacttgccccatgtgcaaatgtgacatactcaaagctttgggaattgaggtggatgttgaagatggatcagtgtctttacaagtccctgtatccaatgaaatatctaatagtgcctcctcccatgaagaggataatcgcagcgagaccgcatcatctggatatgcttcagtacagggaacagatgaaccgcctctggaggaacacgtgcagtcaacaaatgaaagtctacagctggtaaaccatgaagcaaattctgtggcagtggatgttattcctcatgttgacaacccaacctttgaagaagacgaaactcctaatcaagagactgctgttcgagaaattaaatcttaaaatctgtgtaaatagaaaacttgaaccattagtaataacagaactgccaatcagggcctagtttctattaataaattggataaatttaataaaataagagtgatactgaaagtgctcagatgactaatattatgctatagttaaatggcttaaaatatttaacctgttaacttttttccacaaactcattataatatttttcataggcaagtttcctctcagtagtgataacaacatttttagacattcaaaactgtcttcaagaagtcacgtttttcatttataacaattttcttataaaaacatgttgcttttaaaatgtggagtagctgtaatcactttattttatgatagtatcttaatgaaaaatactacttctttagcttgggctacatgtgtcagggtttttctccaggtgcttatattgatctggaattgtaatgtaaaaagcaatgcaaacttaggcgagtacttcttgaaatgtctatttaagctgctttaagttaatagaaaagattaaagcaaaatattcatttttactttttcttatttttaaaattaggctgaatgtacttcatgtgatttgtcaaccatagtttatcagagattatggacttaattgattggtatattagtgacatcaacttgacacaagattagacaaaaaattccttacaaaaatactgtgtaactatttctcaaacttgtgggatttttcaaaagctcagtatatgaatcatcatactgtttgaaattgctaatgacagagtaagtaacactaatattggtcattgatcttcgttcatgaattagtctacagaaaaaaaatgttctgtaaaattagtctgttgaaaatgttttccaaacaatgttactttgaaaattgagtttatgtttgacctaaatgggctaaaattacattagataaactaaaattctgtccgtgtaactataaattttgtgaatgcattttcctggtgtttgaaaaagaagggggggagaattccaggtgccttaatataaagtttgaagcttcatccaccaaagttaaatagagctatttaaaaatgcactttatttgtactctgtgtggcttttgttttagaattttgttcaaattatagcagaatttaggcaaaaataaaacagacatgtatttttgtttgctgaatggatgaaaccattgcattcttgtacactgatttgaaatgctgtaaatatgtcccaatttgtattgattctctttaaatataaaatgtaaataaaatattccaataaaaaaaaaaaaaaaa

SEQ ID NO: 33 - DNA, 1656 bp, Homo sapiens
ccacgcgtccggagtggaattcccaaggtgctggaggttgaaaggcattgagaatctaaaacgctttgcagacagcaagaccctctgtgtaagttaagaatgctcactcagtcccagcaggtactcagagggatccttttatttctccagaacattctgcaggtgagctggggaagcccactggccctggcctcacccccgagcccgagccttcagcctgggaatggtctggcctcttccttgctggctctccagcctggcctcgcaggaccctgggcgggaccccaggaaccctcacccgctatgtgcttccccaagaagcgctccctgtggcctaatttgagaaaacaatgggcctcaatccatattaatgaccctagagggaccctttgtcctcggtgcacaggctgtaatcagcggggctccgggggctctggcctaatttggagggacaggttttatcatcacccttgattcgggtgacccaatctgacaggcccacgaccccctgtatgcggggtccacgtcagagatgggcttcctcccagcggcccaccccagcgggctggggagagggaagggggaggtggtggccatgggggaagttcggggtgaagaaggggtcacagccagacccccacttggatgggcctgtgatcgggttctcgggaggagcaggatattgattagatcagtgaatggtgtggaggcagctctccccaggcacgtgctcccgaccacccaccagcaagcgtctgttgcctgccggtgccagggctgggtggggactctgggacaggccggctgcctaggaggggccaggcaggagccaaggggctggctccagggactgccaggagggccccagggaaggggagccgggaagcgttttggctgcctccggcgtgaagtcgtggaaacgtgtttgcaggttagggccgtggcatcctcgttgcaccatttgagcgcctatggggtgccagatacatgacaaagggccacctcatttaatgcttccctcaaccttcccaggccccgatccccatgttctgggtcaggaggcccattcgaggtcaaggggtgggcgaaggctgacgagacaaacccagggactagctcctgagtcccaaaacctgtcctcacccacccaggggtcccctgcacgctctccagggtgtgcggtgcgtggctgctgggtttgggtgcattagagcctgaggcaagggcttgagtctgaattctcgctacggaccaaatgtgtgcgtcctccctaaatacatatgttgaagccttaactcccaatgtgatggcattaggagaggggacctgtggaatgtagttgagtcctgagggtgcggccccgtgatgaaattagtggcctgataagaagaggcccagagaaccggctctgtctctgctctctgtcgcacgaggaccccacaagaagacggccacctgcaaacagccattgaatctgccagtgacttggtcgtggagttccagcctccagaactgtgagaaataaatgtttgcgatttaaaccgcaaaaaaaaaaaaaaaaaaaaaaaaaaaaaaaaaaaaaaaaaaaaaaaaaaaaaaaaaaaaaaaaaaaaaaaaaaaaaaaaaaaaaaaaaaaaaaaaaaaaaaaaaaaaaaa

SEQ ID NO: 34 - DNA, 2051 bp, Homo sapiens
tcgacccacgcgtccgcggacgcgtggggtctactaaaaatagaaaaattagccaggcgtggtggcaggcccctgtaatgccagctactcaggaggctgaggcaggagaattgtttgtatccgggaggcggagtttgcagtgagccgagatcgtgccactgcactccagcctaggcaacaaaccaagactccatctcaaaaaataaaaataaaaaaagcaggtgatgggatgacatggagtttttgttttgctttgttttgttttgttttgttttttgctgcttccctgataggctatatactgctcccttcagcctctccccgaaaccacaggcgcccaaacaatgaggccagggttggaacccctggccagctagatgatgagctgaaggggaggcaacctttagccagcagacttgagacatctcagtgtactcagggtctgctggctagcaggcccagtggggtctccaaagcccttctgtatccttaatggtccttaaaccctggttgaagatccccccagttgtgtttacttaagccagaaggctgggcaatctctatatcctttctccatcgatcatcctatgattgttttgttagagaattattattgttcagggtaccagatcttagtttcattccacagataataagttcggctccaggctgggcatggtggctcacacctgtaatccctgcactttgagaggccaaggtgagtggatcacttgaggccaggagcttgagaccagcctggccaacatggtgaaaacccatctctactaaaaatacaaaactttgcagggtgtggtgttgcgggaagtcagggaccccaaacggagggaccggctgaagccatggcagaacgtggattgtgaagacttcatggacatttattagttccccaaattaatacttttataatttcctatacctgtctttactgcaatcttggaacataaaattgtgaagatttcatggacacttaccacttccccaatcaatacccttgtgatttcctatgcctgtcttactttactttcttaatcctgtcagctgaggaggatgtatgtcgcctcaggactctgtgataattgcgttaactgcacaaattgtacagcatgtgtgtttgaacaatatgaaatgtgggcaccttgaaaaaagaacaggataacagcaattgttcagggaataagagagataaccttaaactctgaccaccggtgagccgggtggagcagagccatatttctcttctttcaaaagcaaatgggagaaatatcgctgaattctttttctcagcaaggaacatccctgagaaagagaatgcacccctgagggtgggtctataaatggcccccttgggtgtggccgtcttctatggtccagactgtagggatgaaataaaccctagtctcccatagtgctcccaggcttattaggaagagaaaattcccgcctaataaattttggtcagaccggttgctctcaaaaccctgtctcctgataagatgttaccaataacaatggtgcccgaaacttcattagcaattttaatttcgccctggtcctctggtcctgtgatctcgccctgcctccatttgccttgtgatattctattaccttgtgaagtacgtgatctttgtgacccacaccctattcgtacactccgtccccttttgaaagtccctaataaaaccttaccggttttgcggcttgtggggccatcacggagcctaccgacatgtgatgtctcccccggatgcccagctttaaaatttctctcttttgtactctgtccctttatttatcaaactggccgacgcttagggaaaatagaaaagaacccacatgactatcggggcaggttccccaatagtgtggtggcaggcgcctgtaatccaagctgcttgggaggctgaggcaggaaaataacttgatcccaggaggcagaggttgcagtgagccaagatcgcgccactgcactccagcctgggcaacagagggagaccctgtctcaaaatacataagtaaaaaaaaaaaaaaaa

SEQ ID NO: 35 - DNA, 2053 bp, Homo sapiens
ccacgcgtccgaagaaacctgccacagatggaatggcagttcggaaaaccctcattcctcctcagcctcctgatgttgctagtcctcgagtggaaagctctatgcggagtacgtctgggtcacctaggcctgcaggtgccaaacccaagtctgaaatccacgtgtctatggccactccggtcactgtgtccatggagactgtatccaatcaaaataatgatcagcctaccattgccgtccctccaactgcccagcagcccccaccgaccattccaactatgattgcagcagccagtcccccgtcacaaccagccgttgccctttcaaccattcctggagcggtccccatcactccacccatcaccaccattgcagctgcaccacctccatcagtcactgtgggtggcagtctttcctccgtcttgggccctcccgttcctgaaattaaagtgaaagaagaagtagaaccaatggatatcatgaggccagtttctgcagttcctccactggctaccaacactgtgtctccatctcttgcattgctggcaaacaacttgtccatgcctacaagtgacctaccacctggtgcctccccaaggaaaaagcctcgaaagcaacagcatgtgatctcaacagaagaaggtgacatgatggagacaaacagcactgatgatgagaagtccactgccaagagtcttctggtgaaggctgagaagcgcaagtctcctcccaaggagtatattgatgaggaaggtgtgagatatgtcccagtgcgtccaagaccccccattactttgcttcgtcactatcggaacccctggaaagctgcttaccaccactttcagaggtacagtgacgtccgggtcaaagaggagaagaaagctatgctgcaggaaatagctaatcagaaaggagtatcctgtcgtgctcaaggctggaaagtccacctctgtgctgcccagttactacagctgacgaatctagaacatgatgtctatgaaagacttactaacctgcaggaagggattatcccaaagaaaaaagcagcaacagatgatgatctccaccgaataaacgaactgatacagggaaatatgcagaggtgtaaacttgtgatggatcaaatcagtgaagccagagactccatgcttaaggttttagatcataaagaccgtgtcctgaagctgcttaacaagaacgggactgtcaaaaaagtgtccaaattgaagcgaaaggaaaaagtctagacccagaacaatcaggagattggaagcaaatttatgaagaatgatggtgggggtggggggagggttttggttttttccaaagtggaacattgaaataaaggaagtgttccttagttcccgtgtgaaagcagaggaacccatgacatccaagggcgtgaaaggatcagagctgactggacatagtgagctgccttcttgcgttcgggtgcacccctgttaaacctgatctgtgtcataagtgactccggatgcatcagtgtccaccagttggaagcaatgacaaggatggctggctggtgtttttcagccttccggtttatagactgtatttatctagtggattcctgcaggccccatactgagcctggactgaaagtatccactcggaccatctgttatctctctacactgaaaataaaacctcttccacccaccccattcggttcttctgcctgaccttcaaatgcccatgttggccttttacagcagtgccacggcaccaagcgagctgccacatctcacactctaaagggtttgaactattagttcttgtcattttttaaaaaaaaccattcccaagtgaaattgttatatcgtctgtcttgcgtgtgtcagaactgggtttttgtggaggttcagagcaggcaacaccataagttgctctcagatccttgttctgaagtacattcttggttatctgtacttctgtagctggtgtgatgctgttaattgtatgtaccacacatctccagacgttaataaaggactcaaagaggtttttgtaaaaaaaaaaaaaaaaaaaaagg

SEQ ID NO: 36 - DNA, 576 bp, Homo sapiens
  SITE (538): n equals a,t,g, or c
  SITE (565): n equals a,t,g, or c
gcaacatagtgccctgactctactaaaaaaaaaaaatctgtctccttgtttcagtcctcacggcttttgcagtagtcgaaggcttcttcatctctcacctacacattgcaatgcctttgcctcctaaatggcctcccttactcactgctctcctatgccatcttctatctacctcatcaccacttctaattatccttccaaatcacaggtctgatcatccactcacagacctatcgkggctttccattgcctacaaaaatgaaaaccaaaccacagaacttagcatgacagtaaaagccctgcatctagcctccatctactgtatccttcatgcatcttaaactcttgtctattccagataacttgcccttgcatgaaagcaccctcactttgagtgtctctttgagcataccttccctcctttcatccacaccatcttacaaaaatcatcctttttgagcagctcaaatatcatttcctccaggaaatttyccacgactttcttycaatccaaattaattaatctctcttttctccnaggtcatacagctctatctatctatcnatctatctatc

SEQ ID NO: 37 - DNA, 1290 bp, Homo sapiens
gggtcgacccacgcgtccgatttctgacctcgtggggcgtgtggtctccggatggctgggagatgcagtcccagggcctgtgacacgactcctgatgctctggaccaccttgactggggtgtcactagccctgttccctgtagctcaggctcccacagccctggtggctctggctgtggcctacggcttcacatcaggggctctggccccactggccttctccgttctgcctgaactaatagggactagaaggatttactgtggcctgggactgttgcagatgatagagagcatcggggggctgctggggcctcctctctcaggctacctccgggatgtgacaggcaactacacggcttcttttgtggtggctggggccttccttctttcagggagtggcattctcctcaccctgccccacttcttctgcttctcaactactacctccgggccccaggaccttgtaacagaagcactagatactaaagttcccctacccaaggaggggctggaagaggactgaactccacagagtcaggcccagaaagccaagcttgacagctcaggtcttctcttgcccgtcttggtctccacagaacccagtgccttaagattcttgatctgcctccccctagagcaggcctggggctcctgcaatgtgtgtgccaaccctttgtattttgttgaggactcttatttctccgttactctcctaaccttttcttcttttttctttttcccgagacggagtcttgctctgttgcccaggctggagtgcagtgatgtgatctcggctcactgcggcctccgcttcccgggttcgggcgattctcctgcctcagcctcccaagtagctgggattacaggcgggagccaccacacccggctatttttttttttttttttttgatttttggtagagacggggtttcgccatgttggccgggatggtctcgaactcctgaccttgtgatccacccccccccccccctcggccttccaaagtgctgggattgcaggcgtgagccaccacacccagcctcccctaaccttttctaaaggacccaggagttttgaaggatccgggagttcctgcttcactgagctgtgaatcaactgtgaaaatcaaaggccaagagacttatcatgctttatataacatctctagtgttgcctcctgagtttcttctctgaagacacatgtttgggaaacaaaactgtccctttgagataaaatcaaataagaaaattggataataatcacaacctcaaaaaaaaaaaaaaaaaaaa

SEQ ID NO: 38 - DNA, 1322 bp, Homo sapiens
ccacgcgtccggtaattccacaacatctaaaaacaaatgtttgtgatcatgtgtaagcatgaaattgttccaagtaagtgaggatattttagttatgtgaaagacagtttcatggaaggtatttgttttataccagtggctgggatggtggaattggggttatttctacaattattcttagacgattactaaactgttaagaaatgccccatatcatttttgtatctaggaaagaaaaaaatcagtttcatactgttgtcatctgtcagaaatgctcattttattttgaattaaatgtggcttttgaagtacctagttaccttgaattcctggtgaccacatgtttttatctggaaaacctggagaaagttatctgtcccatctcccctgcttgtttttttttttttttttttttggttggagctgctgtttagatgatgcttttactatgcaggagagagtttttgttaaggatatatttgaagattggcttttccatattgtccttcattctttgaccgtggcaaagtgtacagtagattttcatgatcattgcatatttcttgtcattgaaatgtatcttttatgtttttaaatgcattcattttacacttgtgagtttatcattgactttaagaggtagaaatgaaaaatgaaaattaaagctaaagcctttttatctattaatgcagatatattagaataagaatattttgggtttgtgtttattttttaatgaatttatgtttacttgatatggaaaattacgctttataggtggaaaagtagcaaataaagattaagtaaaagtaagtgaaaatgatggggaatatagtattggaattttatagctagttaaaacaataagtatcatctaatttgggtgtttattttgcagatgagaaaacagacctagaaccgtggcatgttttgcctgaaacatacagtgagttagagacagggcctaagatagcttctagcatcagatcaatcccaagaatccatcagcaacctcagaccaacccaagaagataatttaaatctatactgcttattggtcaatatatttggttctagtattaataaagaaaaatgttattaaaatagcatacatagtagtaaaataaaatacaaaaagtgtgttgatttatagctgtttgagatgataaaagtgaagcaaagcctgttaaatcattggaagacttggaaaattattttaaataaacaattacatgtaattaaaaaaaaaaaaaaaaaaaaaaaaaaaaaaaaaaaaaaaaaaaaaaaaaaaaaaaaaaaaaaaaaaaaaaaaaaaaaagggg

SEQ ID NO: 39 - DNA, 1877 bp, Homo sapiens
aattcggcacgagatcctcttaccttggcctcccagaatgctgggattacaggtaatgagccactgcacccggcttgtagcattttttaaaaagttccttcatacaggcccaccactcccagcctcctttatccttttgaccacaagattctctaggcacatcttatatatttccggccccagtcctagaatcagccacttctccaaggagccctgattctttttattagagaatggtattagaaaccaagttctaggcattgggtgtgcttgctactgggatgttgtggcttgtaggacctttcagctgactgagcaagggatgtacatgtatgtatactaaactaagtttttctgtatgcagtcatctgtatctatattaagctaaacatgagttgatgtttccaattctatccattaccactctatccattctagccttcttcctttggttatctgtcacctctcacttctacagacagaaaactggctttcatcattcaccatctttttacttaattgttcaaatctgggatacatatgcagatatagtggcttcagaatacgtattcccatggagaaaaaccttatcaagtagagaacagtgcttaagtgtagttcctgttgcctttagtcttatagacttcatttccaaagtttcttagcaccccccttccccctttggtgaggttgtttcacatattttctagacaattagattcttttgtcaaagtctgtgttccatccggagagcctctgatctcttaaatgattttttaaatttacatacattaaggttcactctgctgtaaaggtctgtgggtttttatctgtctcacagtttttgcatatgttggccttctgcctggaatactcttcccagatatttccccatgactggccccttatctttcattcagatctctgctcaaatattatctccttgaggaagctttccttgagcacccaatctaaaggaatcttctagaacaaaatgaaaattttgttagtgtattttcttcagtatgtgtggtttgttttgaccagtctccatttactaggatgaaaatttaaacagggcagggactgtatctgtatcctggatatatagtgaatgtatgttgatatatgaatgaataatcctgtcccaggtgtgtccagcatcacttatttctagggcatagttttagtactgatcagtagtaattgaaagcaggcttgttcagttgggtttccagctcaccctgcttcactacttaaaaagtgttttggttataaattaggttaagtgtttcagtatattaaagatggcagtcactctgttctctcctgcaatgtttataaccatttatttaaggttattattattattattgagatgaggtctctctgttgcccaagttggagtgcagtggcgcagtttactgcagtcttgacctcctcaggctcaggtgatcctgaatagatgatccttcttgagtagctgggactacaggcgcaccaccacacccggctaattttttttgtattttttatagagatggagtttctctatattggccaggctggtcttaactcctgggctgaagtgatccactcacgcctgtaatcccagcactttgggaggccgaggcgggtggatcacctggggtgaggagttcgagaccagcctggtgaaacctcgtccctactaaaaatacaaaaactagccaggcgtggtggcagccacctgtaatcccagctacttggggagccaaggcaggagaatcacttgaacccaggaggcgcaggttgcagtgagccgagaccgtgccattgcacgccagcctgggggacaagagcgagacttcgtctaaaaaaaaaaaaaaaaaaaaaac

SEQ ID NO: 40 - DNA, 2559 bp, Homo sapiens
gaattcggcacgaggggcttgtaaatgtgtgtgagtttctgagtgtaggtgccgaataaatgtttattgatgatgcctacctatgcaatctgcatggtgcttgtatttctattgcttgtgcatttgcacatcataaacacaaacacacacacacacacacacacacacacacacacaggcttgcttccagagccatacatgctctattttcagtttctgagtgtcctaagaggttatatcctgtctagatggacggaccgagagtacacttggatttctaccaagatatattctcctaattcaccagaaccccccgcttcctgcccatcccctacacagagcatctcacgccatgcagtgcagggaagcacattcctcaaagctcagctgcccacctctgagcaggtgcaaatccacccactgcatcctcccatccacctttctcccctctgacttctgctctcctcctaaatggtctcttttccccctgcctcctcctccttcgtttcccttctccagagaggcagaggttaggtgtgcttgaccaggattcaccaagtgcagacatcaaaacagcaaagggatgtggacaccatctccagcctctcgtttcatggactggctaaggttcagggatgctgaaggatttctcccatgtgcccaaggtagttcacagaagagcctgctccagagcgtgtgttttcccagcctttcccacaacctggcccccggtggaggaagcggttcccctccaccgacccctgcctcccacatcagaggtactgcacccaatgagtgcggccaaccaagaccaccaggggatgaaatgagtcacatcgactgtctctaggatggaaacttggtagggattctgtttcctgtgagcaggaagaacgcgagatgagacacaggaggaccgatcctgctgctctcaggcctctcatatgacttcacagaggacaactttggcccctccccgcccagctctggcaggtgcatgtcagtggactctgtccaacaggcagagtccacggaaaggaaggacaagatgatgtaagcatgagatcccagatgctggccctgggaggggttttagggaccatctcctcattcagtgtctttgcattacacagaaactgggcacatagaggctccaggactggccaaggccaccgggaccggtcccaggctttgcactcccagggtgctgtcccatttacaaaccctcgccgtccattcctttttggagtgagtcctggtggcactcctataggaacagcgtgtggggaggcctaggtgtggcctggcctcagatgaggacaccatccaagtgacccggccgctgcatccctgctctttgtgccacaccccaagtccctttgcttcccggagatggagcagatgacagaggcgcacggaggaagcgggcctggggacacacggtgtgccgagctctttcgtccacctgggtcgacctccacaaatctactgctccggggttcccgcgccggtccccaggcagccaggaggtgacgcggtcggcgaggaaggggctgcggccgcgcggttccttctccaatgacaggcgcgccctctgctgctagaactaggaagcgcgcgcctggcccggctcagagcccgagcttggaacccgcagccgcccgcaccctccagagaaaccggcttagaaaagcctgccgccgcgaaagcaaccagaggccctcccgcttccggggtgctctgaggactcagacaggagggaatagaacctgggaggagaaggaagaggagctacctgaactctgtgaggaaagggaggggatccttgcatttgggatttaggacaaaatccttgcatttgggatttaggctccttccccatcctttgtcctctccacgaagctcctctcaccccaaccaccaaactgtgcccatgaagtgaatggcccaataaggagcctgtgggagccacagtatctggagattttactcggccatctcttgagccctgggaaaagttttaaaatgttcactttggcaacttcgagcctggttcaaagcatggtgtctccgcaggaagagtacaggactgggaatgaggcctcctggaatctggttccatttcaaccactcttttcccctgtgctaagtcccgtgtcctctctgtggctcagtttcctgacctatttattacatgggcctctcatgtcccggaaaattcactgaggtaccaggtatgctacagcactagcaagccgtcgtgccactgccctgctctggctgggttgtcttttcctggaaatgggcagtggtaagaggagggtggagacagagcctccggccatctcccctgctcctcgcccctgctgggactcccactgcgcagtgtttccctcatacctctggacaatcccacagactccttcctccaggcaaggcatccccaaggaagtgcaaataaaaatgctgttggtggtggaggcaacatattcagtgaaaatccaccaaggttactggctgaggctggagcaggatgggggtgaggggaatactgctcga

SEQ ID NO: 41 - DNA, 2116 bp, Homo sapiens
tcgacccacgcgtccggcggagcttgcagtgagcctagatagagccactgcactccagcctgggccacagagggagactctgtctcaaaaaaaaagaaaaaaaaaagaaaaagagaaatctatgacatcacttgccaggctcccatgttcttacctctgcctgccttgccagctctcctcctgctgtgccttctctcagcccatctctgcacttcttcccagtccttcaacacctgtgcttctctctgcccccaggccttccagccagggggtcccaggcaccagaagtgaattcccctcaacccccttctgtctgccctccttcccacgtgaatccttccttgattcctttcatctggtcagctcccattagtatgctctctttgcagcctgccctttctcttttcagtgcgtgatcacaactgtattaggcaatcacctgtctaatgtctgccttcttaattagaacttcaaattcacgtgggcataacatcggtctgccttattccttgtggtatcctggatgtcgaacataacacctggcacctggtgggcaatgattaaatattttgtggaaagaatgggcaaaataaaagagtaaaaaaaaatgagtgcaagatacagtgaagtgatgtggcaatattgctaacttttaaaaatattgtcaaagagatactgagttcgaggaagaggaagatagaaattatgctggaaatgctggagagataaggagtaatgagatgactttctgaggtgagctcatgcctgtaatcctagcactttgggaggccaaggcagatggatcatgaggtcaggagttcaagaccagcctgaccaacatggtgaagctccttctctattaaaaatacaaaaattatctgggtatggtggcacacgcctgtaattccagctactcaggaggttgaggcagcagaatttcttgaacctgggaggcggaggttgcaatgagctgagatcgcgccactgcactccagcctaggtgacagagtgagactccatctcaaatttgaaaaaaggagaaagagatagagggtagcctggaaatcactagaggtgaaacagaggacaatttgcagaacctagaaagaaaaaaacgagtcagtcacagtgaactgcaacctaagcaaacaagcatcttatgcaactgaggggaatgacatagtaacccctgtatccaagggaaggaaactgacccttgtttagccccataatttattcaacccacccagatgcacacatgatcgtggccagctcttctaacattagtattttttgccgcttcgcagctgtacctgaaaatccctgatgaatagttgtcagtctgcagagcccagggaatgttagaatgtaagggttttaacacaatttattcaacccacccagatgcacacatgatcgtggccagctcttctaacattagtattttttgccgcttcgcagctgtacctgaaaatccctgatgaatagttgtcagtctgcagagcccagggaatgttagaatgtaagggttttaacacaatttcaaaaaaaaaaaaaaaatgacttgcaaactgtatatcaaagcaagcactgatgtatattcaatttgcagactacttttccagaaaatgtcatagtggatcttgtctagttccaatgtatctttatggtatcaatttatctacctagtgaaattctttccaaatatctttttaaatttttcatataactttttttcagggacttttagtagcagatgaatatcaatttaaacatttaaaatatagttgacccttgaattgcatgggttcactagtgtgcagattttcttccacctctgccacccctgagatagcaacatcaaccccttcttttcctcctgctcctcagcctactgaacataaagacaaggaggatgaagacccttgtgatgacccacttctactcaatgaaaggtaaatctattttctcttccttatgattttctttctagctttaagaatacagtatataatacttatacaaaaatatgttaattgcagagtttgagaccaacctagaaaacatagcaagaccctgtatcctaaaaaaaaaaaaaaaaaaaaaaaaaaaaaaa

SEQ ID NO: 42 - DNA, 1352 bp, Homo sapiens
ggcacgagctcgtgccgcttttttcctgccatcggtcagaaaaaacatgtcgaagatggatggcattagattatgcaggaatttctattggaatactgggctgctatgtctcaggagtattttacgcattttattgtaataactactggcgtcaggtgtacttgatcacagtgcttgctatgatcctggcagtgttctttgcgcagattcatcccaattacctcacgcagcaatggcaaaggctccgttctatcatcttttgttctgtttcgggatatggagtgattcctactcttcactgggtttggctcaatggaggaattggtgctcctattgtacaggactttgcaccccgtgtaattgtgatgtatatgattgctcttcttgctttcctattctacatttccaaagtcccagagcggtactttccagaatcacttccacggtgaatcagagaagggattgtaccactcgtcacgtgtgttgggaaagaagaaagggtgagaaaccctggcctaaacaatccatcccacagatcctcaggcattcctttgtgtacttggtttttcaccactgagctttaaataagaatggaaatacaagggaaaacctgcgttgtaaacatgaggatttgggaacagatctaggacatgccactgaattgaagaccacccatcttccaggcagggccagaattacagaaaacaattctggacaactaaactacctcggatcaagccaccaaatatggcatatccttgcagtagtgatgttatattggtggcatcagtcaacagtgtatgtcatgcagtacagacatagcaagccttgtcctgactatgtttcacatttgtgaattagaatcaggaacgaagattcagggaatgtctgtcacatcttatggcatcccacctggacagaatatccgatttgaagattgtgattgacttccgtaaaactgtacaactctccatttggcagctgctacataataggtgcttaatgtttgtggtgtgaatgaaataactgaatttgaatagaagtttacatccaaaagtcataataagacaaataatgaaaaactccaaagtcactgattataaagaatatgcaatccatttgggatttattgcatttaaagaaaacagattaaaacagtgcttacgtgaagtaccaaaacctaaaataaaccaagcagagtagctgacttgtaagaaaactgctctgcctggtgaacttcagcatagaagagtgggctccaccttagattttccaccagcaagaggacaacagtctatcactcttaaacaataaacagggtaagactgaaaaaaaaaaaaaaaaaaaaaaaa

SEQ ID NO: 43 - DNA, 1532 bp, Homo sapiens
ggcacgagcccgcacctggggctctccgctcgttagcgcgcccagggcgcctcctcggcccgagagggacccgcccgcggggcctggctggctcagggctacctccttccgcctaggacccccccttcggtgactcccgattccctgtcctaggctgcggtgccccgggaggcgggtcgccagagtagcagacagagctctttaatgggtgtcttctagggcgggtgctgtttgtgcatcatttgggttcccacacacttcctatgaggtggcgaaagccattatgcctatggtgtctgctcacacagggggaaactgaggcccaggcaggacagccccttgcctggggtgggggctgggttgtccttaggcctgtgacttcacctctacagcaccctcctgtggaccctctccctgcccccgccaggccagagtcctgcagccaggcccagaccctggcctgtccgtccggggatgctggacagtactcctccctccagccctcataagtcattgtcattcggatctgcatttccccagcccctctccttctaactggggggcactgtggcccactgtgcccctttctcttcccattccttccccctacacccattccagacatcccagagttaacaaaacccaaaagaaagagaaaaaagactcagagctgcttggaggagatgacatcctcaaatgtagcgccgttgtttgaggggctggtcccaggcacctttctctgtggcctggggtgtgcgttttggtccccagcgtgatttgaaagaagatggaggttcagcgaagcagaaaggaggtcttggaatatgtgaggcctgttccagatggcaggtgcgactcggtggtggcggtggcggcggcagctacgcgctaacagttggagattgtgcacaagggtggagaagagggggcagatggcctgtcggagccagagggcatctctctgaagcgggtcgctgtggtggaagatttctttgacatcatctactcgatgcatgtggagagctcagcggagccaggcaaagcccccaagcacgctgggcagaagaaaacctaccgagcgatcgcagagacctatgccttcctcccgagagaggccgtgacccggttcctgatgagctgtacggagtgtcagaagaggatgcactttaactccaatggcctggaacccaaagaaaacgagcctccatctccactggtctctgggattattgattacaacatgcccctcacctccacctacctgaagcagatgaagcttcgagtgatgaattcccaggagcagccatcctcactgtctccggcacctggcttcgtaaacactgttatcaccgtgctcatctgtgcccatgaagaatgaagcacaaaaccgcacaaacagccggaagcacagacccctggttttgtttcatacagaatggcactaaatccaggtcacctagaaaaaaaaaaaaaaaaaaaaaaaaaaaaaaaaaaaaaaaaaaaaaaacaaaaaaaaaaacacaaaaaaaaaa

SEQ ID NO: 44 - DNA, 1300 bp, Homo sapiens
ggcacgaggggaaagcctgggcttttgacctgtccttggaggcgttgcggcggacttttatcctctccttggggtccgtggcgttctgggagctgctgacagcgcctctggagcaggtggcagatgacagcctttatgagttcctggattttgtggatgccactgaccgatacagaagcctgtgggtctggaggttgctgggcatgtcggcaggcgtgtgtggcatcacagccttggtggggcagctggactgcttcctgatgaccagtggcccccgaggtgtggtccacttctatgggtactcggtggtcagcaccctggccttactggtgagcattgcctttcccattcccatctgtcagcagtgggagcccagctacaaaagggtcaaagcactgtccattgtggggggtgacccccacctcattctcctcgcctccaccactgttttggtaggagccatcgtcagtactgtccagaactttctgttctggcacatgaaggaccatgggagcggcgagctggtcatgggtttctcggtcgccctcagcttgctgggggaaattctgcttcatccgttcaaagctacattgcttaggaaactgtccaggacgggcctggtggggctggggctgagctgcctcgctgggcagctgctgtactactctttcctctggagctggtggtccgtcctccccattcagatcttgagtgccattagcaacagagctttgtggtgggctgtgggggcctcagtagaggacctggccactccccgcatggagagggctctgagtgccttgttccgaggccacttttacgggagtggctgtagcctgggcagctttgtcgggggcttcgtggtgatgcgcttcagcctggctgtgctctaccaggcctgctgtgtggccctgttgctctggttggccttgctcctgtccatacagcggaggctgccccgagagcggaaaatcaagtactcgaagctgctgtccatggaggtgagtgacaccagtgactctgagcaggggacagaacaggactggcttgtgaaggccatgagggaggaacactcagactgaaagggctgagaaatccagagtgtgctgatccagcaaggaacgaatggactgaacaaaactcagcctgctgaggacagaaacctgccctggactgctgggagccggggaagagaggatgggtctgtgctgaaggcccaacaggatcatctcattgcatgattttctttacttttgaagtaaaaggagatttaacttttaaaaaaaaaaaaaaaaaaaaa

SEQ ID NO: 45 - DNA, 2564 bp, Homo sapiens
ggcacgaggacgtgctgggatgtgctggccaagccttgctggtctgccaccttgtcctcgcccctgaagggctccagtagccagcgagggccagcatggcctcccccgccccagcatgcctggggtctctgctttcatggactgtttgtgggtggggtgaggtggtcagtggtcctccttgtgctgtgtctgcctggggctgctcgtgggcaacgtgggtcactccctctgtcgtggtgcagctggcaccatcaggtgctgttcaaacccctctgagccccgagctgcttgtgatctcatttcaactccatgcagcccctctagggcagttttatttccccattttacagatgggaaaagagaaactcagattgcgtaacatgcccaaggaagcaccggtcccagtgttttgttttgttttgttttgtttttgaggtggagtctctgtcacccaggctggagtgctggagtgcagtggtgcaatcttggctcactgcaagctccgcctcccaggttcatgccattttcctgcctcagcctcccgagtagctgggactacaggcgcccgccaccacaccctgctaatttttttgtgttttttgtagagacggggtttcactgtgttagccaggatggtctcaatctcctgacctcgtgatccgcctgcctcagcttcccaaagtcctgggattacaggtgtgagccatggcgccaggcccggtcctagtgttgacaggcaggatcccaccccaaatggatcatcatttcggtccttcattcagccacctgaccctgtttttccaggcatcagggttgcagcccacagaggcactcagacagggagggcccaccagctcctgggtgcggggggctccagaatggagagcgaaattccctctgcctgcacagagaggctccatggaggctttgatagggctggggtggctgtttcatttcagctgggctatgcaatggcaggaagagtctttcgggagagagaggtttaggaagcgggcgatcctggcctatggagggcactccatgggaggggctccatgtgtccaggggagcctgagtaggcagggagggtatgagtgagattggcctggagataccgggcctttagccctggagtgaggtgtttgctttttattctgagagcttggggaggaaggtgctggatcaggtttgagacacattgagctgagaggagcgtgggacatcagcagggacatgcccattgggtctggagctcaagatgggatctggcctatggtggccattagggtggtcagcagtacaggtctgagttggatttggtgcccggtcgcaagttgcatcgaagctagtctcggtgcagtggctttgcagggtagggcagggacacccggggctcaagccgaagaccctcattgtgcagatgggcccagagcaagcaagacttccccagggcatgcccagcacaaggcggctggagccaaagccaggcacccgcgtcctgccaggtacgtcctggacctgcgctgcctcatggcatgtctggttgtctcctgccacctgcggaccctgtgaggcccagcaccagcaagggtgacccagcccctgctcagaatggaggagagatggaggtccccagaggtgcatctagaccccatttccaagggggccctctcgagtgggagcagggagcattttgtcagaaagggcagcctctggagggttgtggtgactgcttgctcctggagttttctgtgctgaggcctctttgggcagataaatcagttgtgtttctgcagcgcttgcctgccttctccttatgacttctgttttgatgttgggaggaaagaagtctcgctccccccagatcgagaggaagtctagctgcacctgactctgggaactccgcctctgcatctcttctgcttggtgggtgtgaaaacacggccagtgggagcggggctctggcgtcacagacatcagaactgcagacacctggcccaggtgtccgtgttctgtgtgtcctgcggccaccgaggctgctcacagacatgagaggccattccccacccagaaccattggtgacaaacaggcagcctcctctaacctccgcaggatggggcccggcctggcagctgcccccagtggccaacgtgggcctctgtggacaagacaggtgcagctaaggctgcaggtgcaaagcaatcccagggtgggcgggcagggggccacctgaacctctgtacagcaaaacagtgttttcctgggatctccctcttcctgttgttctgtgaaagcacctaccagccatgtgaaaagccacccggctaaccacccacatgcaggcgtctggcacagggtggctcactggccgttcaggggtcggcccctcctgatgtttgcatgtcccccttgtgtgaaactcagatttaatttggtgattattaaagtgcaggaacctggggctggtagaggttttttgtccacagattttgcaaagtgccgttaaaaaaaaaaattcatacgctttgttgctaccaataaagagaaaagaaaaaaaaaaaaa

SEQ ID NO: 46 - DNA, 2594 bp, Homo sapiens
gaattcggcacgagtcggcatcttttacctggtggtggtagtgagagatagtcgtcttctctcttctctcctcttgtgttctgagccaaggtacgcagtttctgggtcacatctccaaccagtctcctaaagtgtgttgaccaaaggtgttgctgagtttgaacacattgcatatttaaattgcaataggacatgtgggtgagcaagttagttattttgtctctatgggacagctttgccattctccttcttgtcttcccagtggggcattctgccttttgttaagcagtgttctgggaattatagttctgaattccactgacacaatctcctcttcccaccctccgctctcctcaaacttgccctcatggggctacactaccacaaaggcacatctctccttagggctggtgggctttgctgggaaggagaacatgaaagaattgtatgtagagagttccagaagcttctagacatttcctggtcgtggtggttgtggtgggttttcttgaggtcacaaatatgttcagatttcctccatatagctctgtattttattgtttctgtattcttgtatggttgactttgagtgattcccaggatatttaccctgctattgtcttaccataatcttgatgtgtctagcctcttacaaatgagaaaatcctaccgaggaatttcccatttgtaatagtttgtcttggggagcaaagaggaggatagccaatgatcatgatgatctcctctttttctacgcagagcaggtgttcatgataaaaagcaagtcttttgtgtcttcatgatctgaagagaggaaacaacacggatcaagatgatcctagacctcctaatcatggggatgattacaaggagttgcagaccctactctctattttgcagtgggtggagttgtggataggggtgacccatcagtcattgagaaatgaatctcctgggtgctacttgtgaaagtgaggatcctctctccctttcctgtggatgcagctgagattctggacagcctagacttcttcctcagtgtcagagtaagattgcctcaatggggcggggcaggacacactgctgacctcaccactgggcgccctgggcagccactgcgaggcctcgtcattttcgagttggtgagacaccgcggcagtcgacttggaagatgctctggtggtagaggttagattatttgtagttttgggggccttttcttcaaatatctgggaatttcattgaaaatatgtagttcaggagtgaaggggtctatattctactttataattatcattatcattttggtatcttttgggagaatggcctaaaattgggaccaagatggaaaagaagggaaaggaatgggtcaatattagaatgcccttcgttatcctttcaacttggtaaaccagagattaataccatagcaccactgtggtgaaagacggggtgggcattccccaaaggcatgaccagcagacttctctcagattcttgagtgggtcaagcagaccattctggtctggcttctcctctcagatttatttgagtaatcccctcccttggtgataagattgtgtttcagcaagagtggtagtggtaccatttcggaaggagtaatttttgcagggaagttggtgggaggggggcatagttagaacataaggaggaaacttctaaaggcttgttagtttattttcagagatttcagtacaatcttgggtaatttatggctggcccatctgatgctctggtttatgtttgtaaacactggttgctaccctccctgtccaagatccttgtccccctgtctccatgccatactctccatttttggtgctgtctgtcaagtagagcggctgctaacttgccattttagtaatgctgtgtcaggttgggaagaaaccgatcagaggcatggcagcccctgggattaagttactgttctaatttacagtgccctccctgttgtgacctatgctagaatctatgttttagtctcatcttctaaagaataaatggcatcagacctgtgcttctcttcaacctggtgaaaatgatccaaatgaataaatatttagggatttgtgaggtctttgaaagaattatattgttttactcaaagctgatttttaatcaactaaaacttgctttctagtcaaactgagtaagaaagctgaacaattctagaccatccataacgagagctaccgtttttgctataaagtttttcaggctccctttcttttcagtaaagctgggtccagggaaataatttgtcatttacttaggtaggaagaaatagtctactgcccctttttcttaaagacagtatatgccttcaaaaatgttattataagcattttcaagcatatagaaaagcagaaaagtgtgtaatgagcatccatacacctatcaaccagattaaacaattatatttttcctatttgctttctcttttctgttgaaatatttaaaaatatagataatgttttaatgtatttaagtatgtttaatgtgtaaattaatgtttcaaattcaataaagctggaaatattttatagtaaaaaaaaaaaaaaaaaaaagctcga

SEQ ID NO: 47 - DNA, 2030 bp, Homo sapiens
ccacgcgtccggcctctgctcgcgctgcctgctcggagccgcttgctcggctgcctctggctgggctccgcgatcctctcccccaccctcgggcactgctccgcctccctcccggcgggctgtccccgcagtgctcccggacccggcgagccttcggggcgcgcgtcgctggtggtggttgaggctctagcgataataaatgatagaggatacaatgactttgctgtctctgctgggtcgcatcatgcgctacttcttgctgagacccgagacgcttttcctgctgtgcatcagcttggctctatggagttacttcttccacaccgacgaggtgaagaccatcgtgaagtccagccgggacgccgtgaagatggtgaagggcaaggtagccgagatcatgcagaacgatcgactcggggggcttgatgtgctcgaggccgagttttccaagacctgggagttcaagaaccacaacgtgggcggtgtactccatccagggccggagagaccacatggaggaccgcttcgaagttctcacggatctggccaacaagacgcacccgtccatcttcgggatcttcgacgggcacgggggagagactgcagctgaatatgtaaaatctcgactcccagaggcccttaaacagcatcttcaggactacgagaaagacaaagaaaatagtgtattatcttaccagaccatccttgaacagcagattttgtcaattgaccgagaaatgctagaaaaattgactgtatcctatgatgaagcaggcacaacgtgtttgattgctctgctatcagataaagacctcactgtggccaacgtgggtgactcgcgcggggtcctgtgtgacaaagatgggaacgctattcctttgtctcatgatcacaagccttaccagttgaaggaaagaaagaggataaagagagcaggtggtttcatcagtttcaatggctcctggagggtccagggaatcctggccatgtctcggtccctgggggattatccgctgaaaaatctcaacgtggtcatcccagacccagacatcctgacctttgacctggacaagcttcagcctgagttcatgatcttggcatcagatggtctctgggatgctttcagcaatgaagaagcagttcgattcatcaaggagcgcttggatgaacctcactttggggccaagagcatagttttacagtcattttacagaggctgccctgacaatataacagtcatggtggtgaagttcagaaatagcagcaaaacagaagagcagtgaacccttcaggggtctcagctgccttagactaaaggactttcaacacactggtctcttttaatttagtgaaaagtgtgggagttgtaattaggatcatccaccccagacatggaatcccccctccctggtggtcttaggtctataatcagtgacgaacagagggtgcccttgggccatgtagttaagaaactggaaaatggtttcttcatgttttcccaactctttcatccagtgtccaaaatatataagtaaatagctgtagagtcacatatatgaagtgaatagcatatgtgtcatttagtctccctgaagattcttttcaagatcctgttcagggtcctccaggcatcagctgttgtgtcctctctttgtaacagtggacaggacagaccacccagtgctgcaggagacaggccactgcgtcacctgtgagtggtcaggggctgatgtggcaacaccctctgccaagagacagagctgtcctgagaatgctttgtccttctgagcccatgttttctgctcagtagcagcttggaagcagatttggaatggtttattattttggctgctcttggggactgcgagaagcagagagaatgagagaccagtggcaactgcctgcacagcagagataaccctcttcccttgcttcctttaatagttaaatagactttgtataccaaaaaaaaaaaaaattttttaataaaaaaaaaaaaaaaaaaaaaaaaaaaaaaaaaaaaaaaaaaa

SEQ ID NO: 48 - DNA, 1602 bp, Homo sapiens
ccacgcgtccgcagagactttggatgagtttttagcttctggtaggcagttagagtaagaagcataatgcctaaatcaaccagggtttgggttttctcaaggctgtgtttcagtctttatctaagttctggtgtgttttagtccttatgaggcctggtgtagtcctttagcagtctcaacgaaaaccaatgccattcctccacttttaatctccctagtaccacaaaactgcttagaagactgtttaagttcttcagcctcttagctgccactttttgcttgatttctctcagactgtgtcacttagaaatcatcaaatatctcaagaaagaaagtacctcagattattggggtttgttttctgcctgtcccttctctgtaagatattagcccttcaattaccagctctcttagtagcaatgaagtctaagttttgctttgctagccccatgagactgccaaaagctttacttgcattctctgcctgttggcagctgctttctgcttggcttcttacctttctccccacactgcttacaaatcagaaaaagtctcaagaataaaagcaaaataaatgttgggctcaccttactgagtttctctcctctcataaatcttgaactctccagtcctggctgttttggtagctttccaatggcttcacatggacactccccaaccccgcccccacgatctgtcttttcttgaagttctcaactagcctgggtctgctataagctggttaacaatctctggatatgggtctattttctgattatatctttatttaaaatgattgatatttcaaggtgtttacaaggcatgccaaatactcttccttaccgaatataaaaacactttttcatgctaatattaccagtaaatctctgattcacttggaatttatccttacataaagtgtcaagaataaatctaattttatattttttctattgtgatttagtctaatagcactattgaaaagtctatatactccccactgaattaaagtctctttattatatattaaaatttcatgtgcaacttaatgacatttctattctgttttcttacttataatttttttgcatgtgtcttctgagactgccttaaattatctttggaacaagaatacatttaattgaaattcaatcatataatggaagaaagggtgaaattttttaaaaccatagagaagggaaaacttttttgtgactcaaaattcagattcaagactatgctttcagggatcatttccacagtttgttactagagaatttctctgaacatgtagttttcaaaaaaaaattagattcaaaacagcaaaagactcataaatttgacaacataaaaataaacagctcttgtataattaaacacaaacacacacacacacacgccaaaagcaaagtaaaaagacaaaaagctgaagaaaaaatacttgcaactttcatcaaagacataacttttagaaagagcttctaaaattagaagagataaaaggcctgacagaaaaatagacaagtgacataaccagacagttcacagagaaaaatctggacctttaacatacagatcaggaaaaaaaaaaaaaaaaaaaaa

SEQ ID NO: 49 - DNA, 508 bp, Homo sapiens
gcggacgcgtggggttctgcaggagggttctcatcggcgctgtccagtacagacatggatgagtcatttgtgaatttcagcttttctagtagccacctttaaaaggttaaaaaagattatacaccaaagcagatggaatcatgttttatttaacccatcctatcaaaaatttcaacatgtcatcaaggaaaaagaaatgtgcattttacattattttgctcctactaagtctgagtcctggcacatggtttacaccaacacccacacctcagctcacactggctgtgtggcaggtgccctctggacatctcarccgggcactctgcatccagtgttgcccaccagccgttgctggggctgtgggtgcatctgataaaatgcacccgcagccttggcaatgcctgcagtcctgcccctttgtgaacagtggacctgsacacccccacgcccgtcccartaccgcgtgggatgcctgtgctggtggcagggctttccttgtcaggcacag

SEQ ID NO: 50 - DNA, 612 bp, Homo sapiens
aactcatgtggtttaagggtcaactgcatttcttttttcttttcttttcttttcttacttttcttttctcttctctcttctcttctcttcttttcctttcctttcttttctttccttttttcttgagtcagggtttcattctgtcgcataggctagagtacaatgggatcggctcactgcagcctcaaactccccggctcaagccatcctctggcctcagcctcctgagtagctgggattacaggtgtgcaccactgccacactcagctaatttttaatttttttttttggtagagatggggtctggctatgttgcccaatctggtctcaaactcctgggctcagtgatcctcttgcctcggcctcccaaagcgttgggattataggtgtgagccactgtgcctggctgtcaactgtgtttcaaagtatacatatactttgtagtcctcaaatatctaataaaaatgcacatttgatcaagtcagtcctgktgaaagccccttccattctgaagtgctacgagccccggactttgcctgtgattcctgtctcacgatcatctcctggcattctgcacccactgagcgcctggcagtcccttggccacacccc

SEQ ID NO: 51 - DNA, 2291 bp, Homo sapiens
ccgggcttctttcttgtgttgctgctttctccttcccagctctaaactcccatggtgctggagcagccagagaagaagtgttactagacctgccactgctacctacagtgagccccattctgcacacagaggctgcggactcctttttcccaatcatagaccagaatgcttgtgaaagaagatgtggctgttctgcaggttggagctctaggatcggaagaactcatctgtatcacatatgatccagctgaaagtccctacaaactgggccctctgtgtctttagaagcagcttccaagggcaggaagacttccagagtgcaggactgagcgtgctgctaatcttgttctggtcgagagactgatgagagagacaagaattatggcgcgagaaaagcagcagcagcagcagcaagtctgcagaggggaatgccaaactcgctactgggtgtttttttttgttttgttttgttttgttttgttttgttttgtttgatacagagtttcactctgtcacccaggctggagtagagtggtgccatctcagctcattgcaacctctgccccctgggttcaagcaattctcctgcctcagccttccgagtagctgggattataggcatgtgccaccatgcctggctaatttttgtatttttagtagagacagggttttgccatgttggccaggctggtctcaaactactgacctcaagtgatccgcccgcctggccccccaaagtactgggattacaggtgtgagccaccatgcctggcctgctgtgatttttcattgaacctaattaactcatttttagcccctatttttggtacaataatagaacttaggttgtaatcaactggtgggttctttccgcacactgcacagataagatcagtccacagagaccacagcgttgcagtaaagaaagagtttgatgtgaggccagccacgtgggaaaactggagttatcactcaaatcagtctccccaaaggcttggaggtcaggatttttgtggacaatttggtgggcagggagctagggaatgggtgttgctgatgggtagggggtgaaatcataggggtgtggaaaacagtcctgatgtgctgagttttcctctgggtggggccacaggaccagctgaatcatgaatccaggtggggccagtgtgaagaacgtatcaaaaaatcaatcttaggttctacaatagtgatgttatctataggagcaattggagaagtcacaaagcttgtgacccctggccacatgactcctgggcagtaagagattactatgtctacattttagcagagttcatgcctttcccacaactctaatcttgtagcccttcattaatcttacaaaggcggttttcagtccctgagcaaggaggggtttatttttgggagggactattatcatcctttatttcaggttaaactataaactagattcctgccaaagttggcttggtctacgtccaggaatgacaaggacagctgggagggcagaagcaagatggagtcaattatgtccaatttatcttactgtcataatttttcaaaggcagtttcaaggttactattctcatgattcaacacatcctcaaggagtgagattcagtctgtgtaagtgtatcatgactttctataacacgccttgtcatgcactcttctaccctgctagaattggagtctggcctcagctggttcctaccagcagtactgccatcacctcatcctcatctgccccatctgttgttttggaaccacttgtgtcctctaaaatgcatatgttgaagtcctaaccacctgtgcctcagaatgggactatgtttggagaaagggttttaaagaggtacttaaagttaaatgagatcattactgtgaaccctgatccaaattgacttatgcccttataagaaaaggaaatttggccacttacactcacagaggaagaaatcatttgaagacacagagagaagagggccgaggagagaggtctcagagaaaccaacccaatgacatttcgtcttggatttccagcccccagaattactggaaaatacatttttcttgtttaggccacccaatctgtactactttgttatggcaaccctagcaaactaatgcagtcaccaacccagggtgaaaatgggacattcccaactctagctcttaggccaagcttatttgtaatagattcttgttttcaaaggatatagatattgagattctcaatgtatttgttaaaatacattgtttcttgttaaaagcaaaaaaaaaaaaaaaaa

SEQ ID NO: 52 - DNA, 2842 bp, Homo sapiens
ggcacgagctcgactcactgcaacctccgcctcctgggttcaagtgattctcctgcctcagcctcccgagtagctggggttacaggcatgtgccaccacgcccagctaatttttgtacttttagtagagacggggttttgccatgttggccaggctggtctcgaactcctgacctcacatgatctgcgcacctaggcctcccaaagtgttgggattacaggtgtgagccatcgcacccggccaggcttacctctttgtacctattttgttgaagctgaactgaggcctggggtgcttgcactgtcttggggccctgaaaagtccaaggcacagcagtcgataaatagcaactaaataaatgatgataaatatctaatcaaagttcgatgatagatatcaaattatattaataaatatcaaataacatcgattgtaaatatcgaataaaaattagattcttttaatttttttaaagacacagtgtccagttctgttgcccaggctggagtacagtggcacgatcatagcttactgcagccttgaactcccaggctcaagccatcctcccaccccaccctcctgagtagctgagattacaggtgtgcactgccacaccggctaattttaattgtttgtagagatggggtttcactatgttgcccaggctggtctccagctcctgggcttgagagatctcccaccttcgcctctcaaagtgctgggattacaggagggagccactgcgcccagccacggttagattcttattcctcttggcctgtcaacctgcaggaacggaagcaggaggtggtcgcagcagtttttggaagaagcgttagcaataagtatacttagaacagcttgctgtgcacttaattgtaacataccccatgccaagcaccttgcacgaagtgtttctcattcagtctccttaggagcccagggaggcaggaagcttttgtggttcccgttttataagggaggaagctgaggctcaggttgtctagctcaagggcccggaggtctaggtggacccctgcacatccctgagtattgcgccctggtgggagctggtccgccagactgcgcaggccccacgctgtgtagctgtcacctggacccggaggctgacagctgccctgcctcctggagctcaggcctggcgtgtactcaggaaacaactgtcgccaggactgttcagggagtgcttgaggaggatgaagatggggtttgaggcccagacactctgggggtggctgttgtaggtctagggcaccccactgtggaacccagcctgcccctgccctcaactgtcccccatccctccctgagcccagaactggaagaagttcgggaactcagagtttgacccccccggacccaatgtggccaccaccactgtcagtgacgatgtctctatgacgttcatcaccagcaaagaggacctgaactgccaggaggaggaggaccctatgaacaaactcaagggccagaagatcgtgtcctgccgcatctgcaagggcgaccactggaccacccgctgcccctacaaggatacgctggggcccatgcagaaggagctggccgagcagctgggcctgtctactggcgagaaggagaagctgccgggaggtgtgggggtgggagggtcctgctgtcagtgcacgggttctgtccccactgctgccttcgtgctgtcatctcccgcacgacagtgcagcgggtttgatggtgccagactctcctcggggcgtctgtgccttcctaattggctgtacctcctatggttgggagacgggcgtctcccatatatgtgcgacttggcagctgtgactttgctggtggccctgtgactgtcctgatgagctgctgtctgtcggccccagggtgctgaccaccccacatcgtgtgtgcgcactgtgtgtatagtgtctccgttgcatgcctgtggctgtaccgtccgaattctttggtgggatttgctggtggcgagtgtgagagtgcagacgtgcacttgtcgcctgccacgcgagggggacctgggcgctgttcctgttgtgtgtcccatgtctgccgttgctgtgcatgtgaggctgccgcccctgttgtcctcccgccctctctggggtggggtcggggctcctcctcctcctcctccaccagtgtcgctggctgggagctcaaatggtgtcagcttctcaggtgtcaccttggtgtcctcgtggccaactggctgcctgtggtttggcacacagtgcctgcgctggctcaacactgaagcccgagcttcctggggcggctctgtccccacgcctgcgccacagtgaggttgaacttgactgtcttttggtccccagagctagagccggtgcaggccacgcagaacaagacagggaagtatgtgccgccgagcctgcgcgacggggccagccgccgcggggagtccatgcagcccaaccgcagagccgacgacaacgccaccatccgtgtcaccaacttgtcagaggacacgcgtgagaccgacctgcaggagctcttccggcctttcggctccatctcccgcatctacctggctaaggacaagaccactggccaatccaagggcttcgccttcatcagcttccaccgccgcgaggatgctgcgcgtgccattgccggggtgtccggctttggctacgaccacctcatcctcaacgtcgagtgggccaagccgtccaccaactaagccagctgccaccgtgtactcggtccgggacccttggcgacagaagacagcctccgagagcgcgggctccaagggcaataaagcagctccactctcaaaaaaaaaaaaaaaaaaaaa

SEQ ID NO: 53 - DNA, 765 bp, Homo sapiens
ccacgcgtccggtgataaaagtccttccagtcccatctgtgtggctgtcacttcttcttcccctgtcctgctactccaagcacagtcattcctccaaagtgctgggttcctcctggcccagccggggccattccttagtgggcattattcttgcaagtgtgagagccagagaggggcatgtgtagtatccatgctcacaaacagggctccatcctcctttgtgtggtttctgtgtctagcatgtcatcttccttcctgcccctctgcaactgaggaatttgctgtctttatacccaagtatcacagcagcagaatgggggctgccccatgccatgtcctcggtcatggtggtatcaaaggcaacacctgccaggacaatgctggttatgatttctgccgtcccctgggactggcctcattccttaagaggcaagattaaaaaaaaataaaaagccaggcacgagggctcatgcctataatcccagcactccagcactttgggaggccaaagcggaggattgcttgaactcaggagttcgagaccagcctgggcaacatagcgagaccccatctctacaaaaaatttaaaaatgaggcaggtatggaggtatgcgcctgtggttccagctactcaggaggctgaggtgggaggattgctagagcccaggaagttgaggctgcagggagccgtgattgcaccactgcactccagcatgggcagcagagtaagaacctgtctcaaaaaaaaaaaaaaaaaaaaaaaaa

SEQ ID NO: 54 - DNA, 1896 bp, Homo sapiens
tcgacccacgcgtccggggactccctgggagatgaggccgcgaggtctcccgccgctcctggtggtgctcctgggctgctgggcctccgtgagcgcccagaccgatgccaccccggcggtgacgacagagggcctcaactccaccgaggcagccctggccaccttcggaactttcccgtcgaccaggccccccgggactcccagggctccagggccctcctccggccccaggcctaccccagtcacggacgttgctgttctctgtgtctgtgacttatccccagcacagtgtgacatcaactgctgctgtgatcccgactgcagctccgtggatttcagtgtcttttctgcctgctcagttccagttgtcacgggcgacagccagttttgtagtcaaaaagcagtcatctattcattgaattttacagcaaacccacctcaaagagtatttgaacttgttgaccagattaatccatctattttctgcattcatattacaaactataaacctgcattatcctttattaatccagaagtacctgatgaaaacaattttgatacattgatgaaaacatctgatggttttacattgaatgctgaatatatgtttccttcacaaccaaactggatattcctactgctgctaaatatgagtatggggttcctctgcagacttcagattcgtttctgagatttccttcgtccctgacatcatctctgtgcactgataataaccctgcagcgtttctggtgaaccaggctgttaagtgcaccagaaaaataaatttagaacagtgtgaagaaattgaagccctcagcatggctttttacagcagcccggaaattctgagggtacctgattcaagaaaaaaggtccctatcactgttcagtccatcgtcattcagtctctaaataaaacgctcacccgacgggaggacactgatgtgctgcagccgactctcgtcaacgctggacactttagcctttgcgtgaatgttgttcttgaggtaaagtacagcctcacatacacagatgcaggtgaagtcaccaaagctgatctctcattcgttctggggacagttagcagcgtagtggtcccactgcagcaaaagtttgaaattcattttcttcaggaaaatacccagccagtccctctcagtggaaaccctggttatgtcgtggggctcccattagctgctggattccagcctcataaggggtctgggattattcagaccacaaatagatatggacagcttactattcttcatagcacaactgagcaagactgcttagcactggagggggtccggaccccagtattatttggttacactatgcaatctggctgtaaactaagactgactggagctctcccgtgtcagctcgtagcacagaaggtgaagagcctgctgtggggccagggcttcccagattacgtggccccttttggaaattcccaggcccaggacatgctggactgggtgcccatccacttcatcacccagtcattcaacaggaaggattcctgccagctcccaggggctttggttatagaagtgaagtggactaaatacggatccctgctgaatccacaggccaaaatagtcaatgtaactgcaaatctaatttcatcctcctttcctgaggccaactcaggaaatgaaaggacgattcttatttccactgcggttacttttgtggatgtgtctgcacctgcagaggcaggcttcagagctccaccagccatcaatgccaggctgccctttaacttcttcttcccgtttgtttgacaatgctcagatgcatcagttccttaatatacacgtgaaatttgaaaactgtacattcggtgagattaaattttatatacaactagcaaaaaaaaaaaaaaa

SEQ ID NO: 55 - DNA, 1876 bp, Homo sapiens
tcgacccacgcgtccggtggatgaatgggtttgatagttgtgcttctatttcccaacctctgtatgtgtacctttcatgcaggtggatttcagtgtgttctttggatggcaggccttaagagaagagtcccactgcacagcctcagatacttcatctccatggtgggtctcttctccaaaccaggactgcttccctggtatgccagaaatccaccaggatggtcacagctctttctgggcacagtatgtaagggagatttcacccgtgtgatagccacgaaatgtcagaaaggacaaaaaagtcagaagaaaccaagccatcttggaccactagatggttcctggcaggaaaggctggctgatgttgtgacaccactctggaggttgagctatgaagaacagctcaaggtgaaatttgcagctcagaagaaaattttacaaagactagagtcttacatccaaatgctcaatggagtcagtgtgacaacggctgtacccaaatctgagaggctctcttgtcttctccatcctattatacccctctcctgtcatcaatggttaccgaaataagtccaccttctctgtgaaccgaggtccagatggcaatccaaagactgtggggttctacctgggaacttggagagatgggaacgttgtctgtgtgcagtctaatcatctgaaaaacatccctgagaaacacagtcaagtggcgcagtactatgaagtattccttcgacagtctccattggagccctgccttgtatttcatgaaggtggatactggcgtgagctcacagtccgcaccaatagccaagggcacacaatggctatcatcactttccatccccagaaattaagtcaggaggagctccatgttcagaaggagattgtaaaggaatttttcatcagaggtcctggagcagcctgtggcttgacctcactttacttccaggaaagtaccatgacccgttgcagccatcagcagtctccctatcagcttctgtttggggaaccctacatctttgaagaacttctgagcttgaagatccgcatctctccagatgcctttttccagattaacacagctggtgcagagatgctgtatcggactgtgggggagctgactggagtgaactctgacaccatccttcttgacatctgctgtggaactggtgtgattggcctctctctggctcagcatacatctcgggtccttgggattgaattgttggagcaggcagtggaggatgcaagatggactgcagccttcaatggcatcaccaactctgaatttcatactggtcaagcagagaagattttgccagggctgctaaagtcaaaggaagatggacagtcaattgttgctgtggtgaacccagcccgtgccggactgcattacaaggtgattcaagccattcgaaacttcagggccatccacacgctagtttttgtttcctgcaagctccatggtgaatccactaggaatgtcattgagctgtgctgtcctccagaccctgctaagaagctcttaggcgagccctttgtcctgcagcaagctgtacctgtggatttgttccctcacaccccacattgtgagctggtgctcctctttactcgataagcagcctgggtgacagagtgggacaccatctcaaaaaaaaaaaaaaaaagaaaatgtagttatccctaggagcaatagcaccaattaactctcacccgtggaggaagaattggttattggagagaccctaagggaaaggagattttcagagagactgaatacctataattgtgctgtgtagtgtggaggcaaaaagctccaaaatctagtataacataataaactggatattgaaaactgaaaaaaaaaaaaaaa

SEQ ID NO: 56 - DNA, 1072 bp, Homo sapiens
ggcacgagcttaattctcctgagaacatgacatcacgcaaggctacatggagataaatctcttgaagagcaaactgtcaggaaatgtccaacacaaatggcagtgcaatcacagaattcattttacttgggctcacagattgcccggaactccagtctctgctttttgtgctgtttctggttgtttacctcgtcaccctgctaggcaacctgggcatgataatgttaatgagactggactctcgccttcacacgcccatgtacttcttcctcactaacttagcctttgtggatttgtgctatacatcaaatgcaaccccgcagatgtcgactaatatcgtatctgagaagaccatttcctttgctggttgctttacacagtgctacattttcattgcccttctactcactgagttttacatgctggcagcaatggcctatgaccgctatgtggccatataagaccctctgcgctacagtgtgaaaacgtccaggagagtttgcatctgcttggccaccatttccctatgtctatggcttctcagatggactcttccaggccatcctgaccttccgcctgaccttctgtagatccaatgtcatcaaccacttctactgtgctgacccgccgctcattaagctttcttgttctgatacttatgtcaaagagcatgccatgttcatatctgctggcttcaacctctccagctccctcaccatcgtcttggtgtcctatgccttcattcttgctgccatcctccggatcaaatcagcagagggaaggcacaaggcattctccacctgtggttcccatatgatggctgtcaccctgttttatgggactctcttttgcatgtatataagaccaccaacagataagactgttgaggaatctaaaataatagctgtcttttacacctttctgagtccggtacttaatccattgatctacagtctgaggaataaagatgtgaagcaggccttgaagaatgtcctgagatgaaatattgtcatgaccatggtgatgcctttgtttcctaataaacattaaatcgaaaaaaaaaaaaaaaaaa

SEQ ID NO: 57 - DNA, 652 bp, Homo sapiens
ggcacgagggacgtgaaaatctgccttctcaccatgaggcttctagtcctttccagcctgctctgtatcctgcttctctgcttctccatcttctccacagaagggaagaggcgtcctgccaaggcctggtcaggcaggagaaccaggctctgctgccaccgagtccctagccccaactcaacaaacctgaaagccttcacagcagtgagctgcaatgttggagggcttcatctcgggctgcaaggaccctgggaaagttccagaactccacgtccttgtctcaattgtgccatcaactttcagagctatcatgagccaacctcaccccacagggcctcagtcgccaccatgtgggcctctccagtgcaaaccaccgagcattccaccatgaccggtcacagctacaaatccagagaccatcaatcctgctagagtgcagggtggcaagcacccaagggtggctgaccaagactgcagagtctcctccatcttcaggtccattcagcctcctggcatttaactaccagcatccagtggtccccaaggaatcccttcctagcctcctgacatgagtctgctggaaagagcatccaaacaaacaagtaataaataaataaataaactcaaaaaaaaaaaaaaaaaaaaaaaaaaa

SEQ ID NO: 58 - DNA, 1352 bp, Homo sapiens
ccacgcgtccggacgcagccaggttgtcccagctttcgctctagcgccagcgcggaggacgcgatgtctgggctgtctcgcccgctgcttttggccgtcggctgcctggccgcgctctgcgtaatcacagcggctgggaacaccaccctggccccgaacgtgactacagcctcgtctccaccgcccaccaccacgacagtcccggtgtcaccgacgactctctcgccgctgccggtcaccactccagcaccagatatctgtggaagccgaaacagttgtgtttcctgtgttgatggtaatgctacctgcttttggatagaatgtaaaggtaaaagctactgttcagataattcaacagctggtgattgcaaggtggtgaacaccacaggattctgttctgctaaaaccacaactctgccttccactactacaacttccaccacagctactacatcaggtacaactaataccactctatctccaactatacaacctacgcggaagtctacctttgatgcagccagtttcattggaggaattgtccttgtcttgggtgtgcaggctgtaattttctttctctataaattctgcaaatctaaagaacgaaactaccacactctgtaaagagacccactaaattaacaaggactggcgtgtaactcactgaaaccaaaatattatctttcaagatgtcccacatggaagacgctattctaggatctttaatttttcaaaggatgcatataggagcatcacccttgaagaagaatcagttcagtcactttgctcaacgggcctatttaaagtacgctgcatgagtccttgtggctgtctttcattttacatggctgctgctgtgggattgtgttctctctgcttgacatgccaaatgtaactttaagtgatggaaaacattgtcctgcgcagacaacctcatgactcttttggcaatttaaatgtaatcattttaagcctgaaagctgcattattttcatcctaactcaggatgtagtttagtgaccagaattgagaagaatgtgccaaatgagcatcagtcaggtggatttttggctatcgtttcaaaagtggaataaatttataaatttagtacccttagagtaaaattttgtgcttgataacagttattttttttctacattagaaaaaaagatgccacacagggaattacattccagatttaaagaaatgagaggatacacaacatgaaaagtatagcaggttattgttcatacttgtaaagcaccttatatcattgagaaataaagaacagtgccttaaaaaaaaaaaaaaaaaaaaaaaaaaaaaaaaaaaaaaaaaaaaaaaaaaaaaaa

SEQ ID NO: 59 - DNA, 1335 bp, Homo sapiens
ctggcaggctgggggctctgccaggacagggaggggcctgggcctggccagaccagagggcaggttgagacctggaggcagggtccactgtggtcacacggggccaccctgctctggctcttgagtctcagaatccgaatcgtgaacttcgttgtcatgaacaacaagacctcggctggtggtaagggcaggggtggggcactgacaggggcgctgcgggcagggttctcccagcacctcactccccctgactcgtgaacccctgtgacccagagaccttcgaggatctgatgaaggacggggtctttgaggccaggttccccctgcacaaggtgargggtkggcyggcctggagarggccctggggtgggaccctgggatkggggctctcactctctgtcacccgagccagggggagggacgcctgaagaagacgtgggcgcggtggagacacatgttccgggagcagccagttgatgaaatcaggaactactttggggaaaaggtggccctgtacttcgtctggctgggctggtacacctacatgctggtgccggccgccctgacgggcctcttagtctttctgagcggattctcgctgtttgaggccagccagatcagcaaggagatctgtgaggcccacgacatcctcatgtgtcccctcggcgaccacagccgcaggtaccagcggctctcggaaacctgcacttttgccaagctcacccacctctttgacaatgatggcacggtggtgttcgccatcttcatggctctctgggccacggtgttcctggagatctggaagcggcagcgcgcccgcgtggtcctgcactgggacctgtacgtgtgggacgaggaacaggtgaggtggagctggcagcgcagctgaggccgacccgagcaggggctgttggcgcccgatgccctgcacggcccacatatgcctgccgtgtctgaggaggaaatggcacttcagctcattaactgccccgactacaagctccggccataccagcactcctacctacgcagcaccgtcatcctcgtcctgaccctgctcatgatctgcctcatgatcggcatggcccacgtcctggwggtctaccgcgtcctggctccgcgctcttcagcagctcggcgtgcccttctggaggagcaggtgaccacggccgtggtggwgaccggggctctggtgcactatgtgaccatcatcatcatgaccaaagtggggccgggagcarggcargcccgarctggggggtccaccggagccccaagtgagccmattygggkgcccttcttcggaagatcaacaggagatgcccaagaaacctt

SEQ ID NO: 60 - DNA, 2140 bp, Homo sapiens
ggcacgagcccaggctcaagcaatccttctgccttgacctcccaaggtgctgggattacaggcatgagccgctgcacctggccttcatttagtttctttctttcttcctttctttctttttttagatggagtctcgctctgtcagccaggctggagggcagtggcgtgatcttggctcactgcaacctccgcctcccaggttcaagcgattctcctgcctcggcctcccaaagtgctgggattacaggcatgagccgctgtgctgacgttcatttggtttctataatcaccaaagcccatctggtctcatggcccttgcagatgaatatcctcccttagaacacatcttccccaagagttcaccctgctggcaacttctcatccattaggcctcagctttaatgtatcatcttcagggatgctttcactgtccctcccctccagtgtaatctagatccctgtctctattacccagcactgtcaacagatagaaatgttccctatctgtcctgtccaatattacagccaccactgtatgtggtcagtgagcacttgaaatgtgaactgaattttaagattcgatttaatattaatttatttaaatgtaaacaaccacatgtggccagtggctaccagattgggtagtgtagctctaaattgtaaattctggctgggcacagtggctcacacctgtaatcccagcacttttggaggcggaggcgagagggtcgcctgaggccaggagtttgagacaagcctaggcaacatagcaagactccgtctcaaaaaaaattttttagtaataataatagtaataacttgtaagttctggccaggtacagtggctcacgcctgtactccgagaacattgggaggctgaggcaggcagattgcttgatcccaggagtttgagaccagcctgggtaatgtgtcaagaccccatctctacagaaaacagaaagattggctgggcatggtggtgcacgcctgtagtcccagctactcaggaggctgatgtggaagaatctcttgagccggggtggtcgaggctgcagtgagctacaattgcgccactgcactccagcctgggcaacaaactgagaccctgtatcaaaaataaataaataagttgtaacttttgtgagagcaaggacagtttcatcttacatagttttacccagcacccagcacggtgcctggccagaaatgggactcatggggagttgaaagttggggtttctctcaagccctcgaaaaccatccccctccaaatgccattcagacgcctgaccacaaggtggctccatgacatctctggctcggagtggaagtcctggggaggtcattcaaggaagtggagatccaagcactaattttcttggtctctgtgtctctggtcttctcctaagtcctggagcttgaaaatctgccgcagaatggccgccagtgttacagctgcaaggggaacagcacccatggatgctcctctgaagagactttcctcattgactgccgaggccccatgaatcaatgtctggtagccaccggcactcacgaaccgaaaaaccaaagctatatggtaagaggctgtgcaaccgcctcaatgtgccaacatgcccacctgggtgacgccttcagcatgaaccacattgatgtctcctgctgtactaaaagtggctgtaaccacccagacctggatgtccagtaccgcagtggggctgctcctcagcctggccctgcccatctcagcctcaccatcaccctgctaatgactgccagactgtggggaggcactctcctctggacctaaacctgaaatccccctctctgccctggctggatccgggggacccctttgcccttccctcggctcccagccctacagacttgctgtgtgacctcaggccagtgtgccgacctctctgggcctcagttttcccagctatgaaaacagctatctcacaaagttgtgtgaagcagaagagaaaagctggaggaaggccgtgggccaatgggagagctcttgttattattaatattgttgccgctgttgtgttgttgttattaattaatattcatattatttattttatacttacataaagattttgtaccagtgaaaaaaaaaaaaaaaaaaaaa

SEQ ID NO: 61 - DNA, 257 bp, Homo sapiens
ctgaggggtctcttcttggccatcttctgtgtcttcccatggtcttccctctgttatgcgtctttgtcctgatttcttcttccttggctggtgaggaggccgccgggctccgggtccagaagctctggccggctgktgktctgagccatctgccggtctgctggtttcactgctctggaatctggagtgaggkcattgagctgaaggttggatgggagggacatgttctcccgtggcaggcgcacgttgttgagttt

SEQ ID NO: 62 - DNA, 684 bp, Homo sapiens
ggcacgagcagcgtctgtgccggctccaggtgcctgcctctgggtgtgtgagtgggagactttgctccctggcctcatcctagagaggcccctggtgcctagtgctgaggcctctggggctggaaagcctcagcagaaaggaggcactactgagcaactatgcattgtcattgtcgggtttggggctttcggtggttccttggtgactgggaattgcttgtgtgcatgtgttgggtgcatgcttccgggtctcagctgccccaggcccgcacaggcaaccccttcccatccaaagccattggtggagcttctctggaatcatttgccaaaagcccaaggcagaatccaagggtccaagaccatttccatggagctcatgtttttcttttctgtaggaacttttttttaaccagcacccaccataattccgaaggccacgtttcatctttcctggatcactacagtgaagtattacagttgtacagttcccagtctggccttggcttgctcggataaaactttgtatgtattttgtatggcatagattctatattgtaatgatgtcctatgcaaaaagaaaaattaacgaaattgtaaattttattgttttaacgtgtatgcatgtttagtgacgtttacattttgaaataaaatttatgattcattaaaaaaaaaaaaaaaaaa

SEQ ID NO: 63 - DNA, 1977 bp, Homo sapiens
tcgacccacgcgtccggcaactcaagttcatcattgtcctgagagagaggagcagcgcggttctcggccgggacagcagaacgccaggggaccctcacctgggcgcgccggggcacgggctttgattgtcctggggtcgcggagacccgcgcgcctgccctgcacgccgggcggcaacctttgcagtcgcgttggctgctgcgatcggccggcgggtccctgccgaaggctcggctgcttctgtccacctcttacacttcttcatttatcggtggatcatttcgagagtccgtcttgtaaatgtttggcactttgctactttattgcttctttctggcgacagttccagcactcgccgagaccggcggagaaaggcagctgagcccggagaagagcgaaatatggggacccgggctaaaagcagacgtcgtccttcccgcccgctatttctatattcaggcagtggatacatcagggaataaattcacatcttctccaggcgaaaaggtcttccaggtgaaagtctcagcaccagaggagcaattcactagagttggagtccaggttttagaccgaaaagatgggtccttcatagtaagatacagaatgtatgcaagctacaaaaatctgaaggtggaagttaaattccaagggcaacatgtggccaaatccccatatattttaaaagggccggtttaccatgagaactgtgactgtcctctgcaagatagtgcagcctggctacgggagatgaactgccctgaaaccattgctcagattcagagagatctggcacatttccctgctgtggatccagaaaagattgcagtagaaatcccaaaaagatttggacagaggcagagcctatgtcactacaccttaaaggataacaaggtttatatcaagactcatggtgaacatgtaggttttagaattttcatggatgccatactactttctttgactagaaaggtgaagatgccagatgtggagctctttgttaatttgggagactggcctttggaaaaaaagaaatccaattcaaacatccatccgatcttttcctggtgtggctccacagattccaaggatatcgtgatgcctacgtacgatttgactgattctgttctggaaaccatgggccgggtaagtctggatatgatgtccgtgcaagctaacacgggtcctccctgggaaagcaaaaattccactgccgtctggagagggcgagacagccgcaaagagagactcgagctggttaaactcagtagaaaacacccagaactcatagacgctgctttcaccaactttttcttctttaaacacgatgaaaacctgtatggtcccattgtgaaacatatttcattttttgatttcttcaagcataagtatcaaataaatatcgatggcactgtagcagcttatcgcctgccatatttgctagttggtgacagtgttgtgctgaagcaggattccatctactatgaacatttttacaatgagctgcagccctggaaacactacattccagttaagagcaacctgagcgatctgctagaaaaacttaaatgggcgaaagatcacgatgaagaggccaaaaagatagcaaaagcaggacaagaatttgcaagaaataatctcatgggcgatgacatattctgttattatttcaaacttttccagaccaaagatgaactctgatatgcaaaataacttctattagaataatggtgctctgaagactcttcttaactaaaaagaagaatttttttaagtattaattccatggacaatataaaatctgtgtgattgtttgcagtatgaagacacatttctacttatgcagtattctcatgactgtactttaaagtacatttttagaattttataataaaacacctttattttaaaggaaaaaaaaaaaaaaaaaaaaaaaaaaaaaaaaaaaaaaaaaaaaaaaaaaaaaaaaaaaaaaaa

SEQ ID NO: 64 - DNA, 2632 bp, Homo sapiens
ggcacgaggtgacagagagatactctgtctcttaaaagaaagaaaaagaaaaaagagaagggggatctgtggcaagagctggaaagtccccagacagctctgaggtaccgcctctcatgggctccgtggattatctcatggcctgtgtggctgtctgtctttatctctagtgacatctctgcttttctctgccaagatttatcccttctctgcagccacttgctgtccagcttcccttctttgtagaatctgcctctgcccaatacctttactttcgtgtggcctctctgggctcctccatatcatgacctgtcagctcctctttaactcctttcttctctcaagtgtttctcagatcagagaccagattgcaatgagagaatcagtttggtctggtagtatttcacgccaaaaagagttggtcaccctttggattatatgcctttggttcaggcacctacccctggtcctggctgttggggatggatggtgactgttatgtggcctttacagggctttaggcacaataaagctttcccaggttcagcctactgagtgctatggctatgacctggacattaaactggccctcataggttcagacctggccatggcaattgacgaaccctaccacagggctcttggaaccctgtgaaagccattttattgtatgttcttggctgttgaagggagttgtagcccagctgatggcttccatttcttttctgtggatcttgctttcatcataagcattgtttaggggtatagcatggaagagggagatcagggcctcagcctggttttcaactatgagattgagcagtcagtattcggttgctcagtctggccatgacagaattggagccggccctcaggactcttgatttttagctctctgccctttctgtttacagacccatggcacagaaagccttatgcccagacactgcaggatgcagagttatggagccatatcctttcagaggaatgcctggctactcaacagggttggaaagtcaaacaaggatcaacacctacttttgcctgctgtgtgatgggcccgagcctgcaaagctggaccaaatgtggcccctttcctaagggcggggggcagtcaccttctagtaggggaaggaatttagtctcacttctcctttaggaatctggagtattagacaagtcaaagcaagttaatgaggggttaacataacctcagaggaccactttgagtctaaagtccttccagatgtgtcagattggtagcgccaacttgtcagtttctattaagaagtaataggactgggcttcctgggtgtgagggaaagtaggtctgtgcttaaatgtccttccactctgtcacaaacaggagattgaaacttaggtgcctccattcttatctgtaacctctctcagggttgtttttgaggatgcagtgagttaatgcatgcccccagaagcaggggaagggaactgctttggggggactcctatgtgttacactgaaggactcctttaaatgctttatgacgtttctgttctcttgtaactctgtaaggtcggggttatccctgctttctagatgaagaaacaggcttagagctatttaggtcaaggtcacaaaactggcatgtgacaacagagatttaagtataatttggaaggtggctgtttccaccacaccacaccctactggtagggttgttgtgatcacatgggtaacagctgtgaaagtcaccaagagctttcctggcatccagaagcccttgatctagaggcacatcagtctcctctgctgagaaggaggggacaccactccatgctgttgacatctcttgagttttaaaatggagcttttacttcagggtaactcctatttaagtgttcacacatggattaattcctttgctcgtgactgctgcagataaataaaaactgtggtagggcaccaggccctgagctaggccaggcaggtttggacaatttcctaagccttttataaggaaaactgggtttaaaaaaaaaagttgccctgggtacagtgattcatggactggttaggttggtttttttggtttgttttcctcctatcctttttttatatggaaaaaaattatgcatgcttggaaaggaaaatttgtagcttttcatttatcttttacttatcacctgagcctttctccaggaggcagagagtgaattaaaggctggaaaagcagtatctgatgaggctcagttttctgacagcccaccagccccttcctggaccaagtacattttcactacaaagaggtgtgactaatctttcagagcaagtgatattttagaagcagtagttggaccagatgtggtggcgcatgcctgtaatcccagcactttgggaggctaaggcaggagggtcacttgaggccaggagtttgagaccaacttgggcaacatagcaagaccccatctctacaaaaagtaaaaaataaaaattagctgggcatgttgacatgtgcctgtagtcctagctactcaggaggctgaggtagaaggattgcttgagcctaggagtttgaggctgcagtgatcaccactgcactacagcctgggtgacagagtgagatcctgtctcaaaaaaaaaaaaaaaaaa

SEQ ID NO: 65 - DNA, 1241 bp, Homo sapiens
ggcacgagttcctgcgatgagaacagaggcacaggtgccggccctgcagcccccagaacctggactggagggggccatggggcaccggaccctggtcctgccctgggtgctgctgaccttgtgtgtcactgcggggaccccggaggtgtgggttcaagttcggatggaggccaccgagctctcgtccttcaccatccgttgtgggttcctggggtctggctccatctccctggtgactgtgagctgggggggccccgacggtgctggggggaccacgctggctgtgttgcacccagaacgtggcatccggcaatgggcccctgctcgccaggcccgctgggaaacccagagcagcatctctctcatcctggaaggctctggggccagcagcccctgcgccaacaccaccttctgctgcaagtttgcgtccttccctgagggctcctgggaggcctgtgggagcctcccgcccagctcagacccagggctctctgccccgccgactcctgcccccattctgcgggcagacctggccgggatcttgggggtctcaggagtcctcctctttggctgtgtctacctccttcatctgctgcgccgacataagcaccgccctgcccctaggctccagccgtcccgcaccagcccccaggcaccgagagcacgagcatgggcaccaagccaggcctcccaggctgctcttcacgtcccttatgccactatcaacaccagctgccgcccagctactttggacacagctcacccccatggggggccgtcctggtgggcgtcactccccacccacgctgcacaccggccccagggccctgccgcctgggcctccacacccatccctgcacgtggcagctttgtctctgttgagaatggactctacgctcaggcaggggagaggcctcctcacactggtcccggcctcactcttttccctgaccctcgggggcccagggccatggaaggacccttaggagttcgatgagagagaccatgaggccactgggctttccccctcccaggcctcctgggtgtcatccccttactttaattcttgggcctccaataagtgtcccataggtgtctggccaggcccacctgctgcggatgtggtctgtgtgcgtgtgtgggcacaggtgtgagtgtgtgagtgacagttaccccatttcagtcatttcctgctgcaactaagtcagcaacacagtttctctgaaaaaaaaaaaaaaaaa

SEQ ID NO: 66 - DNA, 1154 bp, Homo sapiens
ggagactctagatccagacccacatggcacggggctgcctccctcaggcagttctcagccaggcccccacccagggcacaggctcaggctgagcggggtggtggatgggctggagccggggagaagggcagcaaggctggctggccgcagccctctgtggctggacacgacttggcaaggccgagggatctgagggctgggctactctcgagggctgccaggttcccagcttgctgcagggaaatgaagggggtgccgccctgaacaggcacatgcctaagcaaggtattgacgcttggataaagctggcaaccaccaggagaagcctttttgggatttttcaaatccttcgtcatccgagctgtgatgatggagtggagcgtggcacgggcccattggagttctgtgggctccatcggcactcagcagggatttggacgtgcaggctggtgggccctgcaggaagcctgctccctgctctgctgcgtgggagggggcagctcgggggaaggggscttgcagagaaacagaagaacatgggctgtggggcaccttcagcagcccggggttccaatcccagctcctccatgtgggagccaagcaccccaggcagcctttcccagccttgcttagggccgggttgggagaatcccaccccgcagggctgtggtgagggttgaacggagggtgtgtggtgagggttgagcggagggtgtgtgatgcgtggtgagggttgagcaataagaaaccagaaccttgcagcctccagggcccgggtgcgtttgcaggccagtggccactgtccgggctgtgatggcaccaaggcaggtggagcaccaggtaccacacagctgggcttcccaccaggctttcccgcgggggtctcagggagcttctccccagcgctgctcggagtctgcaggaactggccttgttctccttagcccgtcactccatacagtattaggtgaggatggatgcgggcgctgtccttgccgggaagtcactgttgaagttgcagtggcttgttcacacctgtgggaagagaagtgaagactttctccttgcattaaaaagtctgaactgtgaaaaaaaaaaaaaaaaaaaaaaaaaaaaaaaaaaaaaaaaagaggttctagatcgcgagcggccgc

SEQ ID NO: 67 - DNA, 1077 bp, Homo sapiens
ggcacgaggagaacagctgacggtctttccataagtgcttctaagagagatgtgtggtaccccgggctaagtagacagcaactgagccctccctcccaccccagggctcccagagcaacagggagcagggagcataggacctggccgcagccaggaatctacactgaccggctcagcccatgaagtatcttgggctgaagtcacaggatgagactgtttgtatctgtaactgtccttgtcatctgtcttgcagatttagaagaggaatcagaaagctgggacaactctgagtctgaagaggaggagaaagcccctgtgttgccagagagtacagaagggcgggagctgacccagggcccggcagagtcctcctctctctcaggctgtgggagctggcagccccggaagctgccagtcttcaagtccctccggcacatgaggcaggtaggcggcaggggcacagcgcatcaggagctcaggaggagagccaatcatgggctgtccctgcccacacgccttgcctctggaccctccaccttcaaaaccctgcaggaagtgactgacagcctcctcggtgggtggctgagggcacagggcgttgggggtattagccataggatcagtgctcccctttcagtgatgacctaagtatcttcaaagaaaagcccagatagttggcatcccatggtcctctaatcctctaagaagctcctaaaggcattgaacagcactgtaattggtttggatgcagcctggaccctgcccattgtaagtgatggtctggctgggcgtggtggctctcacctgtaatcccagcactttgggaggccaagggggagcggatcacgaggtcaggagttcgagaccagcctggccaacatggtgaaaccccatctctattaatacaaaaattagctgggcatggtggcatgtgcctgtagtcccagctacttggaggctgaggcaggagaatcgcttgaacctgggaggtggaggttaacagtgagccaagatggcaccactgcactccagactggtgacagagcgagactccatctcaaaaaaaaaaaaaaaaaa

SEQ ID NO: 68 - DNA, 3067 bp, Homo sapiens
ccacgcgtccgattatattagtcttggctcttttagaaactagtttgcttcatcactttgctggcttctcacagatttctaaaagcaattcccaggctattgtgggctatggtttgatgatattacttataatactgtggatacttagagaaattcaaagcatatatatcattggaattttccgaaatcccttttatccgaaggatgtgcaaactgtgactgtattctttgagaagcaaactaggctcatgaagattggtattgtcagacggattttgctaactttagtatcaccttttgccatgatagcatttctttcattggacagttccttacaagggctccactcagtgtctgtctgtattggattcacaagagcctttagaatggtatggcagaatacagaaaatgctttattggagacagtcattgtatcaacagtacacttgatctccagtacagacatatggtggaacagaagcctggatacaggactcagactcttactggttggtatcatacgtgatcgtttgattcagttcatctctaaattgcagtttgccgtgactgtgcttttgacatcatggacagagaaaaaacaacgtcgaaaaacaactgccactttatgtatactcaacattgtcttttctccattcgtgttggtcatcatagttttttctacactactctcttctcccttactccctcttttcacccttcctgtgttcttggtggggtttccccgacctattcagagttggccaggagcagcaggcaccacagcctgtgtgtgtgcagatacagtgtactactaccaaatggtgcccaggttgactgctgtactgcagactgcaatggcagctggaagtttaggtctcctcctacctggatctcattacttgggccgttttcaggatcgtttaatgtggataatgattctggaatgtggctatacttactgctctattaacattaaggggttagaattgcaggaaacatcctgtcatactgcagaagctcgcagagttgatgaagtttttgaagatgcttttgagcaagaatacacaagagtatgttcccttaatgaacactttggaaatgtcttgacaccctgtactgttttgcctgtgaaattgtattctgatgccaggaatgttctatcaggcataattgattctcatgaaaacttaaaagattttaaaggtgacctcattaaagtacttgtgtggatacttgttcaatactgctccaaaaggcctggcatgaaagagaatgttcacaacactgaaaataaagggaaagcacctctaatgttgcctgctttgaacactttgccacctcccaaatccccagaagacatagacagtttaaattcagaaacttttaatgactggtctgatgataatatttttgatgatgagccaactatcaaaaaagtaatagaagaaaaacatcagttgaaagatttgccaggtacaaatttgtttattccaggatcagtagaatcacagagggttggtgatcattctacaggcactgttcctgaaaacgatctttacaaagcagttctattaggataccctgctgttgacaaaggaaaacaagaggacatgccatatattcctctcatggagttcagttgttcacattctcacttagtatgcttacccgcagagtggaggactagctgtatgcccagttccaaaatgaaggagatgagctcgttatttccagaagactggtaccaatttgttctaaggcagttggaatgttatcattcagaagagaaggcctcaaatgtactggaagaaattgccaaggacaaagttttaaaagacttttatgttcatacagtaatgacttgttattttagtttatttggaatagacaatatggctcctagtcctggtcatatattgagagtttacggtggtgttttgccttggtctgttgctttggactggctcacagaaaagccagaactgtttcaactagcactgaaagcattcaggtatactctgaaactaatgattgataaagcaagtttaggtccaatagaagactttagagaactgattaagtaccttgaagaatatgaacgtgactggtacattggtttggtatctgatgaaaagtggaaggaagcaattttacaagaaaagccatacttgttttctctggggtatgattctaatatgggaatttacactgggagagtgcttagccttcaagaattattgatccaagtgggaaagttaaatcctgaagctgttagaggtcagtgggccaatctttcatgggaattactttatgccacaaacgatgatgaagaacgttatagtatacaagctcatccactacttttaagaaatcttacggtacaagcagcagaacctcccctgggatatccgatttattcttcaaaacctctccacatacatttgtattagagctcattttgactgtaatgtcatcaaatgcaatgtttttattttttcatcctaaaaaagtaactgtgattcttgtaacttgaggacttctccacacccccattcagatgcctgagaacagctaagctccgtaaagttggttctcttagccatcttaatggttctaaaaaacagcaaaaacatctttatgtctaagataaaagaactatttggccaatatttgtgccctctggactttagtaggctttggtaaatgtgagaaaacttttgtagaattatcatataatgaattttgtaatgctttcttaaatgtgttataggtgaattgccatacaaagttaacagctatgtaatttttacatacttaagagataaacatatcagtgttctaagtagtgataatggatcctgttgaaggttaacataatgtgtatatatttgtttgaaatataatttatagtattttcaaatgtgctgatttattttgacatctaatatctgaatgtttttgtatcaagtagtttgttttcatagacttcaattcataaactttaaaaaacttttaataaaatattttccttccttaaaaaaaaaaaaaaaaaaaaaaaaaaaaaaaa

SEQ ID NO: 69 - DNA, 3453 bp, Homo sapiens
ccacgcgtccgggaggaaaatggcggtcgctggagccgccgaccaagaggcttgggagtctgtacctttcccgaccgggccactggaagttggagcctccgccgagtcgcagacaacgcctccgggagggccttcctgatgcgcttgcctgctccctggtctctctgcatggggaaggagtgttcccagcttgcaaactccagctttgcctgtgagaggaacaagcgtccctgatccagaaggtgttcggatggagatggcgagttctgctggctcctggctctctggctgcctcatccctctcgtcttcctccggctgtctgtgcatgtgtcaggccacgcaggggatgccggcaagttccacgtggccctactagggggcacagccgagctgctctgccctctctccctctggcccgggacggtacccaaggaggtgaggtggctgcggtccccattcccgcagcgctcccaggctgttcacatattccgggatgggaaggaccaggatgaagatctgatgccggaatataaggggaggacggtgctagtgagagatgcccaagagggaagtgtcactctgcagatccttgacgtgcgccttgaggaccaagggtcttaccgatgtctgatccaagttggaaatctgagtaaagaggacaccgtgatcctgcaggttgcagccccatctgtggggagtctctccccctcagcagtggctctggctgtgatcctgcctgtcctggtacttctcatcatggtgtgcctttgccttatctggaagcaaagaagagcaaaagaaaagcttctctatgaacatgtgacggagacaatcttctttcagaccatgctaaagaaaaaggaaaactccataaagctgtcaagaaactccggagtgaactgaagttgaaaagagctgcagcaaactcaggctggagaagagcccggttgcattttgtggcagtgaccctggacccagacacagcacatcccaaactcatcctttctgaggaccaaagatgtgtaaggcttggagacagacggcagcctgtacctgacaacccccagagatttgatttcgttgtcagcatcctaggctctgagtacttcacgactggctgccactactgggaggtgtatgtgggagacaagaccaaatggattcttggagtatgtagtgagtcagtgagcaggaaggggaaggttactgcctcacctgccaatggacactggcttctgcgacagagtcgtgggaatgagtatgaagctctcacatccccgcagacctccttccgccttaaagagcctccacggtgtgtggggattttcctggactatgaagcaggagtcatctctttctacaatgtgaccaacaagtcccacatctttactttcacccacaatttctctggcccccttcgccctttctttgaaccttgccttcatgatggaggaaaaaacacagcacctctagtcatttgttcagaactacacaaatcagaggaatcaattgtccccaggccagaagggaaaggccatgctaatggagatgtgtccctcaaggtgaactcttctttactacccccgaaggccccagagctgaaggatataatcctgtccttgccccctgaccttggcccagcccttcaggagctcaaggctccttctttttagggatatgccacattacctgctcccatcaccatccagcccagcaccctggacttcagtcgcctggcccaaccccatgattatggaacgtctcttcaccttaacccaaatccagacccttttgtggtttctatttgtaccacttttctcccaggcctcagttctgaagcttacctttcttctaaggaattgaagctcccagtgacctggagggaggattcctggaaaccaaacaatcagtttaggtgcaggtggagatgttgaatatgtgttaccaagatacagcacaggttcagggaaaagagttcgctactccaggggttatttagaagacactttctctgcctcatcctgccctcaagctttagtcaagaagttatggcccccagtccctgacttcttacttatcccattgaggactgcctttctctctctcagttctggcctctgccccccaaagtcagctctctaaaagcaagcatgttttagaccactcactctttccctctttcttcaggaatgaattgggaaaggctgatgagtaaaacataccatccttttctattttcttgatgctgtttacaacatagtttggtgatatccagagctaatgtacatgctttcaaaagctaatctgcctgttgatgataactaggtacagcgactttaaatacagttgctataatcctgaaaagccccaggagcacatcagggagctgggaaacacagttgcagagaactcagctgtatgttgccctctgaccttggcccagaccttcagaggctcagtctgttgagtctgttgtgactgtcttatgaatcaatctgttgtgccaaccctttctgagattcagagaggtccagctagaaaaagtggcagttttaaccaccaacgtagaagctttttttttccccacaagaccattgtactgcaatacttgactatttgtgtagcaaacagcctcttaggttggagagtattgatttcaaataggaagttggtagactaggtgtgaggatgaaataatgaccttgatttttgggtgtgtattgcagaagcctcgtcgctttcaagtcacatcatatatgcgatctggcctaaccatggagatattggttatcagtttgcagatgaatacacagttctatccaacagaaactgtatctttctgtttgtcagaagttctccgttagttcctgtattagtcaaggttttccagagaaacagaatcaatatatattggggcaggggggcggtggttattataaggaattggctcacgtgattatggaggcggttaaatcccaagatctgcaggataagtcagcaagatggagtcccatgagagctgatggtttagttccagtctgatggcagcaggcttgacgccaaggaagagatgatgtttaattcaagtccgaaggcaaggaaaaagctgatggtcctgtccaaaggctattaggcaggaagaattctcttagggcagagttagctcttttgttctattcaggccttcaactgattcagcaaggcccgcccacatttgggaggacagtctgcattactcagtctactgatttgaatgttaatgtcattgagaaacaccctcacaggaacactcagaataatgtttgaccaaatagctgggcatcttgtgacccagttaagtggatacataagattaactatcacagtgactcagtggaattttttgtttgcttttgtacagttttaaaataaaagtttggtatttgtgttttggaaaaaaaaaaaaaaaaaaa

SEQ ID NO: 70 - DNA, 1109 bp, Homo sapiens
ccacgcgtccgcggacgcgtgggtcgcccacgcgtccgtgtttccattagtgatactgatgtctcactgttgttctctccgagttgacttttctgtgcctttgtgcatgctcttatctcctctgcttggaatgtccttttcagcctgtcaaactccttcaaaatccagctcagatgttacattttctttaagcactcctgaccccaccccccaaatagacttagtccagccttcttctgggttcccacagcactcagtacagtttgaaaggtcctttataatagtcattattacatttttcaaaaataatttcatattcattaacctcattagattataagcacctcaattatgtagactgttttatcactgctgtcccagcacagcacctggcacagttagctgttcaagacatctctgttgagtgggtaaatgaatgagttccactccaggttcctgtgtttgtgacctccaggggcctcttctcttcccttccccttctcacgtaggctgatgccctggtcttccagctatgcactctacctgcctctcgatgctctaagccgatgtgtccatcatttggctgtttgcatattctgattcatgacattttcctgcacagtgctggctgacactctgtagcccatcatatctgacttctctggccagcctgtatgcctaccatcagctcgccctccaaggcacagtccttccccgtttcctgatgttttcacttctgccccagccatgcaaatctcagcacacacagctcattaaatagctttgaacctctcccttctttttttttcaatactgtttggcaaatgctttccaagagcctactaagggctgggcacagcgcctcatgcctgtaatcccagcactttgggaggccgaggcagttagatcacctgaggtcagaggttggagaccagcctggccaacatggtgaaaccacatctctactaaaaatacaaaaattagctgggtgtggtggcaggcacctgtaatctcagctacttgggaggctgaggcaggagagtcgcttgaacccggcactccagcctgggtgacaagagcaaaactccttctcaaaaaaaaaaaaaaaa

SEQ ID NO: 71 - DNA, 1158 bp, Homo sapiens
tcgacccacgcgtccggcctgccttttactgttatttaggaccccagagcactttagcctgtggtggcgaggcttgcagaaactccagttccaacctccaggctgtgtgattgtcctgtccctggggctggtctaaatgctccattcattggcattggctgagttctgccgggattggcagcactgcgttccggcttgtagtcccacagttgctgtgctctttccccgtgtgcagcgcagattcttcctctgtgccctgtggttgctacgagcgcatgggggagggctggggtcagcaattcaagactgtcttttctatcctcttcactgcctctttcagcaatatgaaggtactgtgattgctcacatgatttttggttcttatgaaggtgctttttgtgtaggtggttgtcagatttggtgttcctgcagggaggacaatcggtggaggcttctatttggccatattgctctgcctcccattccagcttgtttctatttttaatttttgttgcaatggagtcttttgcctggccctgaataatatttaaataaatcacaaggacttgaaactacaaaatgtatacttagagccaaagtcaccttacttgtaagaactggaaatggggataatgctctctatggttatgcagcctactcttttactaacctttctggactagatctttgaagtgcgtcttagctttcctcctttcctgaagagagcagagatagtgctgctttaactgtggtcatacatgtatgaggaataactttagtgtgagctgttggttttaaagagtcatatattattctatgcacttttgtaagttcattttataatgagcagattggtcaactgacatttttgattatttgtaatacatgtgttgcttggaataatactgttaatttccagaaatataagtgaaccttagcttttctgttggtggcttttaaactttttatgatgggaaaatgtgtgaattttctcctgggaaagtatagactggagacttagataccagtagatgaattgaggaatttctgtgtagcagtttaatatagaaaagagttagctgtccatgaggaagggctttaagaacaacaataactaccaaaaaaaaaaaaaaaaaaaaaaaaaaaaaaaaaaaaaaa

SEQ ID NO: 72 - DNA, 1269 bp, Homo sapiens
ccacgcgtccgagaggagagactaaggacgctaggtgggcagggctcttcacttgcagcctcgaagcggaggatccctgtgtcccagccgggcatggccgacccccaccagcttttcgatgacacaagttcagcccagagccggggctatggggcccagcgggcacctggtggcctgagttatcctgcagcctctcccacgccccatgcagccttcctggctgacccggtgtccaacatggccatggcctatgggagcagcctggccgcgcagggcaaggagctggtggataagaacatcgaccgcttcatccccatcaccaagctcaagtattactttgctgtggacaccatgtatgtgggcagaaagctgggcctgctgttcttcccctacctacaccaggactgggaagtgcagtaccaacaggacaccccggtggccccccgctttgacgtcaatgccccggacctctacattccagcaatggctttcatcacctacgttttggtggctggtcttgcgctggggacccaggataggttctccccagacctcctggggctgcaagcgagctcagccctggcctggctgaccctggaggtgctggccatcctgctcagcctctatctggtcactgtcaacaccgacctcaccaccatcgacctggtggccttcttgggctacaaatatgtcgggatgattggcggggtcctcatgggcctgctcttcgggaagattggctactacctggtgctgggctggtgctgcgtagccatctttgtgttcatgatccggacgctgcggctgaagatcttggcagacgcagcagctgagggggtcccggtgcgtggggcccggaaccagctgcgcatgtacctgaccatggcggtggcggcggcgcagcctatgctcatgtactggctcaccttccacctggtgcggtgagcgcgcccgctgaacctcccgctgctgctgctgctgctgggggccactgtggccgccgaactcatctcctgcctgcaggccccaaggtccaccctgtctggccacaggcaccgcctccatcccatgtcccgcccagccccgcccccaacccaaggtgctgagagatctccagctgcacaggccaccgccccagggcgtggccgctgttacagaaacaataaaccctgatgggcatggaaaaaaaaaaaaaaaaaaaaaaaaaaaaaaaaaaaaaaaaaaaaaaaaaaaaaaaaaaaaaaaaaaaaaaaaaaaaaaaaaaaaaaa

SEQ ID NO: 73 - DNA, 2911 bp, Homo sapiens
ccacgcgtccggcaaggcattcatttcctcctacggtggatgcggacgccgggaggaggagagccccagagagaggagctgggagcggaggcgcagagaacacgtagcgactccgaagatcagccccaatgaacatgtcagtgttgactttacaagaatatgaattcgaaaagcagttcaacgagaatgaagccatccaatggatgcaggaaaactggaagaaatctttcctgttttctgctctgtatgctgcctttatattcggtggtcggcacctaatgaataaacgagcaaagtttgaactgaggaagccattagtgctctggtctctgacccttgcagtcttcagtatattcggtgctcttcgaactggtgcttatatggtgtacattttgatgaccaaaggcctgaagcagtcagtttgtgaccagggtttttacaatggacctgtcagcaaattctgggcttatgcatttgtgctaagcaaagcacccgaactaggagatacaatattcattattctgaggaagcagaagctgatcttcctgcactggtatcaccacatcactgtgctcctgtactcttggtactcctacaaagacatggttgccgggggaggttggttcatgactatgaactatggcgtgcacgccgtgatgtactcttactatgccttgcgggcggcaggtttccgagtctcccggaagtttgccatgttcatcaccttgtcccagatcactcagatgctgatgggctgtgtggttaactacctggtcttctgctggatgcagcatgaccagtgtcactctcactttcagaacatcttctggtcctcactcatgtacctcagctaccttgtgctcttctgccatttcttctttgaggcctacatcggcaaaatgaggaaaacaacgaaagctgaatagtgttggaactgaggaggaagccatagctcagggtcatcaagaaaaataatagacaaaagaaaatggcacaaggaatcacacgtggtgcagctaaaacaaaacaaaacatgagcaaacacaaaacccaaggcagcttagggataattaggttgatttaacccagtaagtttatgatccttttagggtgaggactcactgagtgcacctccatctccaagcactgctgctggaagaccccattccctctttatctatcaactctaggacaagggagaacaaaagcaagccagaagcagaggagactaatcaaaggcaaacaaaggctattaacacataggaaaatatgtatttactaagtgtcacatttctctaagatgaaagatttttactctagaaactgtgcgagcacaacacacacaatcctttctaactttatggacactaaactggagccaatagaaaagacaaaaatgaaagagacacagggtgtatatctagaacgataatgcttttgcagaaactaaagcctttttaagaaatgccagctgctgtagaccccatgagaaaagatgtcttaatcatccttatgaaaacagatgtaaagaactatatttcaactaacttcatcttcactgcatagcctcaggctagtgagtttgccaaaaccaaagggggtgaatacttccccagattcttcctgggaggatggaaacagtgcagcccaggtcccatgggggcagctccatcccagagcatttctgatagttgaactgtaatttctactcttaagtgagatatgaagcattatccttttgttcagttgccccgggcttttgaacagaagagtaaatacagaattgaaaaagataaacactcaaccaaacaatgtgaaaacgggttctgtagtatttgtaaaaaggcccggcccaggaccactgtgagctggaaaagggagaaaggcagtgggaaaagaggtgagccgaagatcaattcgacagacagacggtgtgtatgcccctccctgtttgacttcacacacactcataactttccaaatgaaaccccacagtatagcgcatattttcgatatttttgtgaattccaaaaggaaatcacagggctgttcgaaatattgggggaacactgtgtttctgcatcatctgcatttgctccccaagcaatgtagaggtgtttaaagggccctctgctggctgagtggcaatactacaacaaacttcaaggcaagtttggctgaaaacagttgacaacaaagggcccccatacacttatccctcaaattttaagtgatatgaaatacttgtcatgtctttggcccaatcagaagatattcatcctgcttcaagtcagcttcagaaatgttttaaaagggactttagctctggaactcaaaatcaatttattaagagccatattctttaaaaaaaaaaagctggataatattatctgtaatatttcagtcctttacaagccaaatacatgtgtcaatgtttctagtatttcaaagaagcaattatgtaaagttgttcaatgtgacataatagtattataattggttaagtagcttaatgattaggcaaactagatgaaaagattaggggcttccacactgcatagattacacgcacatagccacgcatacacacacagacacacagatgtggggtacactgaacttcaaagcccaaatgaatagaaacacattttctggctagcagaaaaaaacaaaacaaaactgttgtttctctttcttgctttgagagtgtacagtaaaagggattttttcgaattatttttatattattttagctttaattgtgctgtcgttcatgaaacagaactgctctgcttttctgtcagagatggcaagggctttttcagcatctcgtttatgtgtggaatttaaaaagaataaagttttattcccttctgtggtaaaaaaaaaaaaaaaaaaaaaaaaaaaaaaa

SEQ ID NO: 74 - DNA, 5023 bp, Homo sapiens
gttcgctgtcatctgacgcccccatcacatctgccccactcaagatgctggcccccagtgggtccccaggcgtctggagggagcccagcatccatcacgccacagctgcctctggcccccaggagcctgcaggtggggactcctccgtggccacacaaaacaacgatggcactgacgggcaaaagctgcttttattctacatcctaggcaccgtggtggccatcctactcctgctggccctggctctggggctactggtctatcgcaagcggagagcgaagagggaggagaagaaggagaagaagccccagaatgcggcagacagttactcctgggttccagagcgagctgagagcagggccatggagaaccagtacagtccgacacctgggacagactgctgaaagtgaggtggccctagagacactagagtcaccagccaccatyctcagagctttgaactccccattccaaaggggcacccacatttttttgaaagactggactggaatcttagcaaacaattgtaagtctcctccttaaaggccccttggaacatgcaggtattttctacgggtgtttgatgttcctgaagtggaagctgtgtgttggcgtgccacggtggggatttcgtgactctataatgattgttactccccctcccttttcaaattccaatgtgaccaattccggatcagggtgtgaggaggctggggctaaggggctcccctgaatatcttctctgctcacttccaccatctaagaggaaaaggtgagttgctcatgctgattaggattgaaatgatttgtttctcttcctaggatgaaaactaaatcaattaattattcaattaggtaagaagatctggttttttggtcaaagggaacatgttcggactggaaacatttctttacatttgcattcctccatttcgccagcacaagtcttgctaaatgtgatactgttgacatcctccagaatggccagaagtgcaattaacctcttaggtggcaaggaggcaggaagtgcctctttagttcttacatttctaatagccttgggtttatttgcaaaggaagcttgaaaaatatgagaaaagttgcttgaagtgcattacaggtgtttgtgaagtcacataatctacggggctagggcgagagaggccagggatttgttcacagatacttgaattaattcatccaaatgtactgaggttaccacacacttgactacggatgtgatcaacactaacaaggaaacaaattcaaggacaacctgtctttgagccagggcaggcctcagacaccctgcctgtggccccgcctccacttcatcctgcccggaatgccagtgctccgagctcagacagaggaagccctgcagaaagttccatcaggctgtttcctaaaggatgtgtgaacgggagatgatgcactgtgttttgaaagttgtcattttaaagcattttagcacagttcatagtccacagttgatgcagcatcctgagattttaaatcctgaagtgtgggtggcgcacacaccaagtagggagctagtcaggcagtttgcttaaggaacttttgttctctgtctcttttccttaaaattgggggtaaggagggaaggaagagggaaagagatgactaactawaatcatttttacagcaaaaactgctcaaagccatttaaattatatcctcattttaaaagttacatttgcaaatatttctccctatgataatgtagtcgatagtgtgcactctttctctctctctctctctctcacacacacacacacacacacacacacacacacacasacacggcaccattctgcctggggcactggaacacattcctgggggtcaccgatggtcagagtcactagragttacctgagtatctctgggaggcctcatgtctcctgtgggctttttaccaccactgtgcaggagaacagacagaggaaatgtgtctccctccaaggccccaaagcctcagagaargggtgtttctggttttgccttagcaatgcatcggtctctgaggtgacactctggagcggttgaagggccacaaggtgcagggttaatactcttgccagttttgaaatatagatgctatggttcagattgtttttaatagaaaactaaaggggcaggggaagtgaaaggaaagatggaggttttgtgcggctcgatggggcatttggaacttctttttaaagtcatctcatggtctccagttttcagttggaactctggtgtttaacacttaagggagacaaaggctgtgtccatttggcaaaacttccttggccacgagactctaggtgatgtgtgaagctgggcagtctgtggtgtggagagcagccatctgtctggccattcagaggattctaaagacatggctggatgcgctgctgaccaacatcagcacttaaataaatgcaaatgcaacatttctccctctgggccttgaaaatccttgcccttatcatttggggtgaaggagacatttctgtccttggcttcccacagccccaacgcagtctgtgtatgattcctgggatccaacgagccctcctattttcacagtgttctgattgctctcacagcccaggcccatcgtctgttctctgaatgcagccctgttctcaacaacagggaggtcatggaacccctctgtggaacccacaaggggagaaatgggtgataaagaatccagttcctcaaaaccttccctggcaggctgggtccctctcctgctgggtggtgctttctcttgcacaccactcccaccacggggggagagccagcaacccaaccagacagctcaggttgtgcatctgatggaaaccactgggctcaaacacgtgctttattctcctgtttatttttgctgttactttgaagcatggaaattcttgtttgggggatcttggggctacagtagtgggtaaacaaatgcccaccggccaagaggccattaacaaatcgtccttgtcctgaggggccccagcttgctcgggcgtggcacagtggggaatccaagggtcacagtatggggagaggtgcaccctgccacctgctaacttctcgctagacacagtgtttctgcccaggtgacctgttcagcagcagaacaagccagggccatggggacgggggaagttttcacttggagatggacaccaagacaatgaagatttgttgtccaaataggtcaataattctgggagactcttggaaaaaactgaatatattcaggaccaactctctccctcccctcatcccacatctcaaagcagacaatgtaaagagagaacatctcacacacccagctcgccatgcctactcattcctgaatttcaggtgccatcactgctctttctttcttctttgtcatttgagaaaggatgcaggaggacaattcccacagataatctgaggaatgcagaaaaaccagggcaggacagttatcgacaatgcattagaacttggtgagcatcctctgtagagggactccacccctgctcaacagcttggcttccaggcaagaccaaccacatctggtctctgccttcggtggcccacacacctaagcgtcatcgtcattgccatagcatcatgatgcaacacatctacgtgtagcactacgacgttatgtttgggtaatgtggggatgaactgcatgaggctctgattaaggatgtggggaagtgggctgcggtcactgtcggccttgcaaggccacctggaggcctgtctgttagccagtggtggaggagcaaggcttcaggaagggccagccacatgccatcttccctgcgatcaggcaaaaaagtggaattaaaaagtcaaacctttatatgcatgtgttatgtccattttgcaggatgaactgagtttaaaagaatttttttttctcttcaagttgctttgtcttttccatcctcatcacaagcccttgtttgagtgtcttatccctgagcaatctttcgatggatggagatgatcattaggtacttttgtttcaacctttattcctgtaaatatttctgtgaaaactaggagaacagagatgagatttgacaaaaaaaaattgaattaaaaataacacagtctttttaaaactaacataggaaagcctttcctattatttctcttcttagcttctccattgtctaaatcaggaaaacaggaaaacacagctttctagcagctgcaaaatggtttaatgccccctacatatttccatcaccttgaacaatagctttagcttgggaatctgagatatgatcccagaaaacatctgtctctacttcggctgcaaaacccatggtttaaatctatatggtttgtgcattttctcaactaaaaatagagatgataatccgaattctccatatattcactaatcaaagacactattttcatactagattcctgagacaaatactcactgaagggcttgtttaaaaataaattgtgttttggtctgttcttgtagataatgcccttctattttaggtagaagctctggaatccctttattgtgctgttgctcttatctgcaaggtggcaagcagttcttttcagcagattttgcccactattcctctgagctgaagttctttgcatagatttggcttaagcttgaattagatccctgcaaaggcttgctctgtgatgtcagatgtaattgtaaatgtcagtaatcacttcatgaacgctaaatgagaatgtaagtatttttaaatgtgtgtatttcaaatttgtttgactaattctggaattacaagatttctatgcaggatttaccttcatcctgtgcatgtttcccaaactgtgaggagggaaggctcagagatcgagcttctcctctgagttctaacaaaatggtgctttgagggtcagcctttaggaaggtgcagctttgttgtcctttgagctttctgttatgtgcctatcctaataaactcttaaacacaaaaaaaaaaaaaaaaaaaaaaaaaaaaaa

SEQ ID NO: 75 - DNA, 1129 bp, Homo sapiens
aattcccgggtcgacccacgcgtccgattagatggcgctagatatttcacttttttatttgttttatttttttttttttttgagatggaatttctctcttattgcccaggctggagtgcagtggcacgatcttggctcacctcaacctccgcctcccgggttgaagcgattctccttcctcggcctcccgagcagctgggattacaggcatgcgccaccatgcccggctaattttgtatttttagtagagatggggtttctccatgttggtcaggctggtcttgaactccctacctcaggtggtccacctgcctgggcctcccaaagtgctgggattacaggcgtcagccaccgtgcctggcctgagaattcacatttttaacaatttcccaggggatgttagtgcagcctgtctggggaccatggttcgagaaccatagctctagatttttctaagagcatttctgtctccatgccagacctgttttcctccatgaagtatactatttcaatgctcgacttagtgtttatgttttactctttctactgtttttacaatcttaatccagcctataaattcctctgggcagaaattataccttccacactctttcattttctgttttgtaaaataatgagtacatcttcagcatgattaataatagaatggagaaaggggaaaaacctcagactatcaaccccagtaaacaacatctccaagtggatatcagccctagaattatcttacaaatttacatttctaacaagttcccagatgaggccgatgctgtagattcagggaccactctttgagaagaactttgacagggactttaagaggatcaagtgaacagtctattatgtaagccattaacacagtggctggcacaaagtcagccttcaaaactgttagttgatgtgacttttacttgataaacgctcagataaatcttgttaagttgaacaaaatgtttatcaagctcagctacggagtgatttatttatgtgagatggagtgacatttcataggaagcagtgcttaattacagctatgctcacacctggtattgccagtgtgctactgaggtcagttcccagccccatgtgtaaaaaaaaaaaaaaaaaaaaa

SEQ ID NO: 76 - DNA, 1889 bp, Homo sapiens
gatccccggtgcggtgaccattatcatgacggtcatcggcgcgattctcacctcgctggtggtggcgcgagaatgggaacgcggcaccatggaggctctgctctctacggagattacccgcacggaactgctgctgtgtaagctgatcccttattactttctcgggatgctggcgatgttgctgtgtatgctggtgtcagtgtttattctcggcgtgccgtatcgcgggtcgctgctgattctgttttttatctccagcctgtttttactcagtaccctggggatggggctgctgatttccacgattacccgcaaccagttcaatgccgctcaggtcgccctgaacgccgcttttctgccgtcgattatgctttccggctttatttttcagatcgacagtatgcccgcggtgatccgcgcggtgacgtacattattcccgctcgttatttcgtcagcaccctgcaaagcctgttcctcgccgggaatattccagtggtgctggtggtaaacgtgctgtttttgatcgcttcggcggtgatgtttatcggcctgacgtggctgaaaaccaaacgtcggctggattagggagaagagcatgtttcatcgcttatggacgttaatccgcaaagagttgcagtcgytgctgcgcgaaccgcaaacccgcgcgattctgattttacccgtgctaattcaggtgatcctgttcccgttcgccgccacgctggaagtgactaacgccaccatcgccatctacgatgaagataacggcgagcattcggtggagctgacccaacgttttgcccgcgccagcgcctttactcatgtgctgctgctgaaaagcccacaggagatccgcccaaccatcgacacacaaaaggcgttactactggtgcgtttcccggctgacttctcgcgcaaactggataccttccagaccgcgcctttgcagttgatcctcgacgggcgtaactccaacagtgcgcaaattgccgccaactacctgcaacagatcgtcaaaaattatcagcaggagctgctggaaggaaaaccgaaacctaacaacagcgagctggtggtacgcaactggtataacccgaatctcgactacaaatggtttgtggtgccgtcactgatcgccatgatcaccactatcggcgtaatgatcgtcacttcactttccgtcgcccgcgaacgtgaacaaggtacgctcgatcagctactggtttcgccgctcaccacctggcagatcttcatcggcaaagccgtaccggcgttaattgtcgccaccttccaggccaccattgtgctggcgattggtatctgggcgtatcaaatccccttcgccggatcgctggcgctgttctactttacgatggtgatttatggtttatcgctggtgggattcggtctgttgatttcatcactctgttcaacacaacagcaggcgtttatcggcgtgtttgtctttatgatgcccgccattctcctttccggttacgtttctccggtggaaaacatgccggtatggctgcaaaacctgacgtggattaaccctattcgccactttacggacattaccaagcagatttatttgaaggatgcgagtctggatattgtgtggaatagtttgtggccgctactggtgataacggccacgacagggtcagcggcgtacgcgatgtttagacgtaaggtgatgtaacttcttatctttcgccagcaaagacactaccgccgggccggcaaggattgccagccctgcaattgccagcaaaaagttgttttccagaacgcgggacaacagccacagcacaatcagcgctgcgccaaaataccaggtcgtggtcagctcttccagcacgtctgccacctcacgccagcgttgctc

SEQ ID NO: 77 - DNA, 845 bp, Homo sapiens
  SITE (807): n equals a,t,g, or c
ccacgcgtccgcgcagacctgcgcacagccaaggaggtccagacgatcgaggtctataagcacgaggagtgctcgaggccccacaatgggcgctggattggatgtttggcaactgattccgactggatggtgagctgggcagactgtgggatgggatggcagctccgggccctgtcagctgtgggcctgtggttcacagctggggactcccacctttctgtccaggtctgtggagggggcccagccctcaccctctggcacctccgatcctccacacccaccaccatcttccccatccgggcgccacagaagcacgtcaccttctaccaggacctggtgaggccctgtgtctcacttctgccacccccactgactcttcccttcagtcctgacccctgagcaccttccctgtcctctgcagattctgtcagctggccagggccgctgcgtcaaccagtggcagctgagcggggagctgaaggcccaggtgcctggctcctccccagggctgctcagcctcagcctcaaccagcagcctgccgcgcctgagtgcaaggtgggtccggcaggggccgcggagcggctgggaggcaggggtgtgggcaggccagtcatgcccctctttcctccaggtcctgacagctgcaggcaacagctgccgggtggatgtcttcaccaacctgggttaccgagccttctccctgtccttctgatctctgacgacacccccagccagctcagggttttagagtgtttttcattttcttttttttttttttttacaataaagtttcaggcttttttaanaaaaaaaaaaaaaaaaaaaaaaaaaaaaaaaaaaaaaa

SEQ ID NO: 78 - DNA, 1799 bp, Homo sapiens
gaattcggcacgaggcagcattgaactcctgggctcagatgatctttccacctcagcctcccaagtagttgggactttaggcatgctctgccacgcctggctattattgatgtatttatttttagagatgaggtctcactgtgttgcccagactggtctcgaactcttggcctcaagccatcctcctttctcagcctctacagtagctgggatttcaggtacatgccactgtgccctgcttattccctttaaaatacggtaaccacagggaaggagggattcttccctgctaatatttgtctgtccagtctctggcgctgagcttggtgcatgaaacccctaacatttattaggcattgtggaaagtacttcccgtgtattgtctcagaaacaacacagtgtcccgacaaaaacttgagagtcaagtggcccacagcgggcaagttgcttattttctcttaggtttctcatctgtaaagtgggaataatattagtacccccttgtaggatgattataatgtcttgtggctacaagccaaggaatgccaggaattcctggaagccaatagaatgtcctatccctgctcggaagctagaagaggcaagaaagaattcttcattaggacctttggagagagcatggccccggtaacaccttgatttcagacttctggcctccagaactgtgagaggataaacttccattgtcttagacacccagttcgtggttaatttgctacagcagccccaggaaactaatacaaggactgaacatgtgaacactggtaaaaaaaaaaaaaaacaaaaacaaaacctagaactgtgcctggccatagtaaatactatgtaaatgtttgtgaaataaatcctttcttaaaaatgtcacagctccctgaggtaggtgttatttttattcctatattccagaggaggaaactgaggcttaggtcaagcccataactatgtgacaaatgaaatatcctccatgttctctcatttcccccacttaattggacctacctttttaaatgctcattcagctgaggcttcttgaacattttatgacaccctttgcgtatagactgagaggtaacaggaaattcatgttttgtttgggaaaggcctggcctatgatgcgggaacaaatccacccagcaccacggtgtctgcgtcatgcagagtctggttactctccggggcagctgtgctctctgcagtcgttcctgatcgaggctgcctcattttgtgatgccactatatcaacctatggcttccaagatatctgtgacaaattaaaaaagagcatgatgtgtatcatgtgtgctcatagctgtgggcctgaatggatcacatggcatcagattaactggaaaggttgctggtagctatggtcttcccttgtgcccaggaagtggaaaatgaaataggatttggggaacatttagctttggctcggtcacagcctccagactttaaagccacgtttttaaagccaaaggtagttgtgggccaggtgtggtggctcatgtgcgtaatcccagcactttgggagactgaggcgggtggatcacctgaggtcaagagctcaagaccagcctgcccaatgtggcaaaaccccgtctctactaaaaatacaaacaaaaaattagccggctgtggtggcgtatgcttgtagttccagctacttgggaggctgaggcaggagaatttcttgaacccgggaggcgagtgagccgagatggcaccactgcactccaacctgggtgacagagcaagactctgtctcaaaaaaaaaaaaa

SEQ ID NO: 79 - DNA, 2463 bp, Homo sapiens
tcgacccacgcgtccgctccatctaggacaagtcaggatcgagatccaagttctctctccacctcagaaacaacggtggcaccttcattggggagtactgaatttcagccacttgtgcagtcaacaacacttctacctgaagcctcccatgaccagtttgtggctcaaggtcaccaggaaagtacatcaccacggccacctcatgattcatctctttctgctcccctgcccaaactgtgtgtttttgttactccatctcttctttcagcaatgtgcagcctcttggacaacctcttgacgattgctcccagagacactgcaaaggcttttcgacaagctcatctcatagaacttctctgtagcattgcagatgctaccctcatacagacatgtgtccaggaactcagagccctgctgccttcatcacctccagctgaacacactcaggctcaggtttcctttctcctggaatacctatcctctttgtccaggcttctgcagtcatgtttattggtggagcctgaccttgtgattcaggatgagcttgtgaaacctcttatcaccaatatcattggaattctcaccatatgtaccaaagatgtattagataaagagttaatatcagctttttatcacacatggacacatttatttaatcttctggccatgctcctgaggaaagctggtgccatcacactcccgtctgttaccgtggccctggccaagcactggacagcggcgattgatatgttctgcacatgtgcaggcttgtctgccacgtgtcctgccctgtatactgccagcttgcaattcctttctgttctcttgaccgaagaagcaaaagggcatctccaggctaagagcaaaacacatttatgctgtagtccaacagtggcttcacttcttgatgactctcaggaaaatcagaaatctctagaacaacttagtgatgtaatccttcagtgctatgaagggaaatcctccaaagatatcctgaaaagagtagctgcaaatgcattgatgtcactgctggctgtcagtagaagagcacagaaacatgctttgaaagccaatcttatagacaattgcatggagcagatgaaacacataaatgcacaactgaacctagattctctgaggcctgggaaagcagcattgaaaaaaaaggaggatggtgttattaaagagttaagcattgccatgcagctcctaagaaactgtctttatcaaaatgaggaatgtaaagaagcagctcttgaagctcaccttgtccctgtcttgcactctctctggccttggattttgatggatgattcattgatgcaaatttctctgcagctcctttgtgtctatactgcaaattttccaaatggttgcagttctctttgttggtcaagttgtggacaacaccctgttcaagctacacatagaggagccgtgagcaactctctgatgctgtgtatcctaaagttggcttcccagatgccactggagaacaccacggttcagcagatggtttttatgcttctttcaaacctggccttgtcgcatgactgtaaaggagtaattcagaagagtaacttcttacagaacttcctctctctagcattgccaaaaggaggaaataaacatctaagtaatctgactattctttggttgaagttactcctgaatatatcatctggagaagatgggcaacaaatgattctgaggcttgatggctgtctagacttactaacagagatgagcaaatacaagcacaagagcagccctttattgcctcttcttatctttcataatgtttgcttcagtcctgcaaataaacccaagatcctggctaatgaaaaagtcattactgtgcttgctgcctgtctggaaagtgagaatcaaaatgctcagaggattggagcagctgccctttgggctctgatttacaattatcagaaggcaaaaacagctttgaaaagcccatcagtaaaaagaagagtggatgaagcatactccttagcaaagaaaactttcccaaactcagaagcaaaccctctaaatgcctattatttgaaatgtcttgaaaacctcgtgcagctccttattcttcctgagtgccatgggatgctacaccttgaagctgacagtcatcaacaggggagctaaagttgaagccagctgtgtgtagcagctgttacctgaagacgtgctacctctctacaaagtgttgatccccttctttcccatgagagagagaactggtgatactccaacaccgtccagttgtggcagctctccagaagtaatagcagctgacaactttctgtgccttttcctttctgttgaaaaggcatagaaagttctgggaacataaacatttttacccttttctatgccatttattttgtaaaaatcctatttaacagttatttaataaaacaatatttttagaaactaaaaaaaaaaaaaaagggc

SEQ ID NO: 80 - DNA, 1168 bp, Homo sapiens
ccacgcgtccgggcctctgttgatgctcctcagcctactcgggaacgtgaaggggcagctggcgaaagggcattcctggggccacttgctctgccccactgataaggcacacccgcggtgcactgtgagctctttgaggactgaggccaggggatgcctcctggaacctgccaggcctctctgttctgtgaaggtcagtatccacttgattcctccaggcggcgctccaggtgggaggagcagggtcttctgctgtttccaaaggaatggccatgacactgcttttgaccttagaagtggattcagggacccagcaaagagcgggggtgggttcccagggacaggcagtcctcccggggcttacatgctttttgctaactttcctattagcagcttcagtttatatcacccagagtgcgtgggataatgttgaagtcgctgaagttacgggttattttatgtttttacatgggatttttctgtttttgattggaagaaggagacagaaattggaggaaatgggattattatcctagggaagggccgttggcaaggagttgagccggcccctctgagccctgggggctatctgacctgaagcctggacactgggcccttcaggtcgcaagaaaaagttccctcctaaattctattaggattttggagaatttttgcacagtaagaagctctgggttgctccttgggcttctcaaaagggaaaagttcaattcaaagattgtaaactacgaagtattccagccgtgttgctgatctagttggatagttgtacctcaaaaaagtaggtgagaactggcttcctcattgtcccaggatgtcaaatactaatgacataagagctcacttacgtgccaaaattcacttttatactagtttttcagtgctttaatatttgtaacttaaattttaaaactcgtatttacaaacactactgtaacttcagtgaaactgaattgtgcgattgaagctttttgcttatcatagtatttattacactacttaattcagtaaatatataaaagtagccttcaatttatttttatattattttacatgtttttacctgcagttgtgtatgtgaatttaccttggtaatcgagatgtcatgctaaggaccaataaactatcactgaacaaaaaaaaaaaaaaa

SEQ ID NO: 81 - DNA, 1707 bp, Homo sapiens
tcgacccacgcgtccgatttaaatcaccatcatctcttatctggattctttcagttacctcctgattaattccctgcttcttgtgttgctttccacagatcactgcctgcatagcaaacagaatgatttcctaaaaaaaaaaaattgagactgtattgttcccttgcttaaagccctccaacagcttcccattgcaataaaaataaatgtcaccttcttatttggcctataaggcctgacgtggtttggctcctgcctctgtaaactcatcatctaccccttgtccccaggttctcatgctccagccacagtggctaccttcctgtcccgcgaatgtacccagtatatactacctcagacttttgctctggaacattcgttctcatttttgcatggctaaccctttctgaattagtcagggttctccatagaaagataatcaattggttttttatatttttaaggagattttattatggagaattagcatatgcaaatatggagaccacaatgtgccatctacaagctggagacccaagacagctggtggtgtaattcagtctgagtccgaaggctgagagccagaggaactgatggtgtgaatcccagtctgaaggcaagggaagatgaaatgagatttcccagctcaagtggtgagacaagaaacagagaaggggggacaaattcctctttcttccatgttttgttctattcaaaatggattggctgatgcccacagtggggagggcaatatgttttaccgagtccactgattccaatgctaatctcatccggaaaccctcacaaacacacccagaaacgatgtttaatctggacatcccatgcaaggtcccgtcaagttgacacaaaaattaaccatcacactttcccgcagtttgggtttcagctcaaacatttttccctcagataggccttctctgaccatctttctaacttcatgtccaagacatcctttgtttcgctatctaattatatttgattcagggcttgacatgtgcttccaccctgctcctctaaatagacaaaaattttggccatgtgctgaattgaccacggtgtggaggaagacatattctcctgcatcatcagtggggaatgcatgcattggctaaaaacctctttagagggcacttgtacagtatccattagaactaaaactatagcttcatgagggaaagagactatggccatagtaggagttcagtaacttgttgaaagaatggtgaatttgaagattaaatcacagagtatctgattccagttctttttaacttcctttttttctccatagctttcatcccatatttaaaatgtcctctgctaagatgccaacacatatcctttaaagtaaaattcctagctgggagcagtggctcacgcctgtaatcccagcattttgggaggctgaggcgggcggatcacttgaggttaggagttcaagaccagcttgaccaatatggtgaaaccttgtctctactaaaaatacaaaaattagctgggtgtggtggtacgtgcctgtagtcccagttactcaggaggctgaggcaggagaattgcttgaacccgggaggtggaggttgcagtgagccgaggtcacaccattgcactccagcctgggcaacagaatgagactctgtctcaaaaaaaagaaaaaaaaaaaaaaaaaaaaaaaaaaaaaaaaaaaaa

SEQ ID NO: 82 - DNA, 1480 bp, Homo sapiens
ggcacgagcggcacgagtgaacatccatgtactcaccatctctttaccttcttccctccctcccctccctcctccagttgagtctctccagaagcccccgattcaacaaggggttacaaagagccatggagaagacaatgaagggttctacaattaagattttgctctattttttccatcatatctatgcatctctccatacctttattcctctacccaatccatctatttttttatgcatttcaaagtacattgcagacattagtacatgacacctctaatcagttttatgttcctttcctttttactttatacgaaataaaaatcacagttaacaattatcaagtgcttactgtcaggcactgtgccaagcactttccttgcattacataatttgaatctcatggtaaccctataagtacagttaccaccttcattttacaaatgagaagaactgaaacagagaacaatggtgtcaattaacattttaaaagtctttctatgggccattcacagtgcaagtacttttcatgcattatctcagttaatcccttatagcaatttcataaaggcaatactattacagatgacaaaattgagactttgagaaaaagatcctgcaacctaataagcatcagaacctgggtttgaattgagggagtctgactccactatgcttggcttcgccattggttagccaccctattgtagcatttgtctttgctattgtgttttagctttttgggtccacttatgtttctcaccagactgtggtctctcaagttcgagtcatgttttagtcttcttagttccaggccatcattcagatacaagtaggcacttcatagatgtttcctgaatggattcacaaacaatgaatagtaatagctgaaagccttacatcttagaacgaagtaaaacagtgaccattctagaaaatgcaatgaaaatcttgaaaactgatgataggtcctgttgataatttcctgaggttttctttacaccaacaggatttcctgagtaacctggagatgcgagagacagcctgggggagttcagtgctcttgccagcccaggcaggagcacacgcccataccctttggctcaccaggcatcttttataagcccactgtgtggcaaacaccaggctaagggatggggaggacacagaggctaaacctgcaaggccccatcttacggagcacataggctaacagggcataggaagagactagcacattcataaccatgacaaaagtcatgatgggcacttcacaagaaagagacaaacccagtttttaaagcaattccaaggaaggagaaattagattatggtgtagagaagaggctcagcgacaccctgttggggaaattttatttgggatgggcacaattttcaataatagaaatgtggcagggagtaaatgagcaaagatgggaaaatgcagtcccatgatgcctcgtgccgaattcggcacga

SEQ ID NO: 83 - DNA, 425 bp, Homo sapiens
tcgacccacgcgtccgctagttctagatcgcgagcgccgcccttttttttttttttttttttttttttttttttttttacatctttggcaaagggtaaaaaagcatatatgaaattaaaaatagtatcaaagaattcaactacaaagggcttaacaaacttcgtaaattggagatatataggacattgtacctaacctaatagaaacttaaacattttttagttatgtatgtcagtttttaaccatgttccatagaggaatgttaacaatgtctaaaaaatcagtgtcatacaaaatacgttatttcagccaggcatggcagctcatgccggtaatcctagtgctttgggaggctgaggcaggaggatcacttgaagccaggcaagaccatatagtgagactctgtctctgcaaaaaaaaaaaaa

SEQ ID NO: 84 - DNA, 1732 bp, Homo sapiens
ggcacgagacatccattgaagctgcaacaccaccccccgccacttcacctccttcctgacatgctctgctcctcctttctccccctcagcactgctgccatctgggctgcattattctcgggtatgggggctgtccgacattccccatcagaaggaaaaagatccctgaaaagtagcaggtgcttacatttctggcctctacccaccggctgcagtagtcccccaccaccctgcaatgtgacaaccaaaaatgtctctagatgttgccagaagtcctctagagatgggagggtacgactgccaccccgctgagaattcctgctgtcactggagtgggggctgttttctctcccatgcctctggtaccttgggggtcccccctgctcccaagggctgcttccaccaccctgtccatccatcccgattggctcccaggaggttttagctccgggcttcctgtctcccacaccactcctcacagttctccatgatttcaacatccaggtgggcgacgcagcctctcggttccttgaccctctgggtgatcctgctgcttctaccgggccaaccagtactcctaggagccctcacaatttgaccctcaggcatcccattgtctgcctggtgccacctttctttggctctgtccccaacggggtcttcactccattaatgccatcagcctctgacccagctccaaaccagctgtctagtaacccccgtcgcgcatcctcaacatccggttccccctcttgcattgctgcaatcatttggtgaaagcacaacccaaatgaaactcaagcttggctgggcacgggactcacacctataatcccagcactttgggaggccaaggcaggtgaatcgctttgagctcaggagttcaagagcagcaagaccccatctctacaacaaacaaacaaaaatcagccaggtgggatggcgcaaacctaaaatcccagctactcaggaggctgaggtgggacgatcagtggagccccagaggtcaaggctgcagtgagccatgatctagccaatgcacttaccctggatggacagagtgagaccctgtctcaaaaaacccaaaacccactctccaccttttcccacagagcaggccttgctcaggggtcctcccacacccctccctcatcttctcactctctgctgcttttcactttttctttgaacttatgatcgctcctccccattctctctcagctggggaccttacttcctacttaactcaaaagcagaaatgatcatgaaacgtgcacaagctcccactgcctcatcatcctacctccgtgcacctctgtacacttctattttttttccatttctatgctgaaccctctggcaccaaccgaggccaacacctccattggacccgaccctcttgttcactcaagcacattgctccaaaaatccttattttgcaaggttttctctttcatttgctccatcagcaaatggaataacctcttagccccatgtctaccttgctacccttactacaaaactggacgtgaatgccgaaaccctgtctctaccaaaaaatataaaaattagccaggtgtggtggtgcatgcctatagtcccagctactcaggaggctgaggcacaagaatggcttaaaaccgggagagagaggttgcagtccagcctgggtgacagagtgagactcggtctcaaaaaaaaaaaaaaaaaaaaaaaaaaaaaaaaaaaaaaa

SEQ ID NO: 85 - DNA, 2131 bp, Homo sapiens
ccacgcgtccgcccacgcgtccgcggacgcgtgggcgcgctttcggctgcgagctctctgtggtgctggcagcgacatgtggcgcctcccgggactcctgggccgagctcttccccgtacactgggacctagcctctggagggtgactcctaagtccaccagcccagatgggcctcagactacctcctccactttgctggttcctgtgcctaacctcgacaggtcaggtccccatggcccaggcacgagcgggggtccaaggtcccatggatggaaggatgccttccaatggatgtcttcccgtgtctccccgaacaccctatgggatgccatatcttggggcactctggccgtgctggccctgcagctggcaaggcagatccacttccaggcatccctgccagcaggacctcagcgggtagaacactgctcctggcacagtcccctggaccgtttcttctcatctcccttgtggcacccatgctcctcactgcgacaacacatcctccccagccccgatggcccagctcccaggcacactggcctcagggaacccaggcttggccaggaagaagcctcagctcagccccggaacttctcacacaactctttgagaggagctcgtcctcaggacccctctgaggaaggtcccggtgattttggcttcctgcatgccagtagtagcatcgagtccgaggcaaaaccagcccagcctcagcccactggtgaaaaggaacaagataaatcaaaaactctttcccttgaggaggctgtgacttccattcagcagctcttccagctcagtgtttccatcgctttcaacttcctgggaacagagaacatgaagagtggcgaccacacggcagccttttcttacttccagaaagctgcagcccgcggctacagcaaagcgcagtacaatgcgggcttgtgtcatgagcatggcagaggcacccccagggacattagcaaggcggtcctttattatcagttggctgccagccagggccacagcctggctcagtaccgctatgccaggtgcctactacgagacccagcctcttcgtggaaccctgagcggcagagggcagtgtccttgctgaagcaggctgcagactcaggcttgagagaggcccaagctttcctcggggtgcttttcaccaaggagccctacctggatgagcagagagctgtgaaatatctttggcttgcagccaacaatggggtatgcgatctcagtggacaagcatgttggggatgaagcctgataagagaagggattttggaactggtactgagttcttctgtgcttaggagattgttggataggagccttggcctggcttcaagccttagtcgctcactgacttactgtgtgaccgttgggcagttgcagtagtacgccagagctggcttgcaccaggctgtgagagctgttggcagcttaaaatctgctatggtgggaatatttgcaccacagaaattgctaaatgccataaaacagggctttttccctcctcgagagccagttgttcaacatttaccagcacactactgggcctggtcacttcttgattcaaacctgtttcctcgtctttaaaatcagaataataatgcttgccttacctgtccagtacttcacagggtggttgtgaggatcaaaatctaactgagataactaacaggtgtgacagtgctgtgaaacctgtacacatgaaaaacacatcattacaagtgatggtaacccagggaaattagaagacgcatcaagtggagacagtaaacagggaacactgctcagtttggggtgggtggggatgtctggttgtctgtgaactggggtcattggcattcagacaattcagatgtgttccatgaagcattagttctctgggatgcttgtaagtcataagaggaaaaaaatggttagatgggtttgggaaatactgagttaaacagttaatataggaagtctcaaagctttatgtcactgtagatcactgaaaaggccatctgtaatttgctgtattcctcaagtgtatttgaccagtatatcttttgagttgcatcttgaaggaccaggagtcttggattaaatcaagcaatatatgcgtgaaaaaaaaaaaaaaag

SEQ ID NO: 86 - DNA, 1143 bp, Homo sapiens
cgcgtccgagcagatctgaggacatctctgtgccaggccagaaaccgcccacctgcagttccttctccgggatggacgtggggcccagctccctgccccaccttgggctgaagctgctgctgctcctgctgctgctgcccctcaggggccaagccaacacaggctgctacgggatcccagggatgcccggcctgcccggggcaccagggaaggatgggtacgacggactgccggggcccaagggggagccaggaatcccagccattcccgggatccgaggacccaaagggcagaagggagaacccggcttacccggccatcctgggaaaaatggccccatgggagagccaggtgaggagggcagatacaagcagaaattccagtcagtgttcacggtcactcggcagacccaccagccccctgcacccaacagcctgatcagattcaacgcggtcctcaccaacccgcagggagattatgacacgagcactggcaagttcacctgcaaagtccccggcctctactactttgtctaccacgcgtcgcatacagccaacctgtgcgtgctgctgtaccgcagcggcgtcaaagtggtcaccttctgtggccacacgtccaaaaccaatcaggtcaactcgggcggtgtgctgctgaggttgcaggtgggcgaggaggtgtggctggctgtcaatgactactacgacatggtgggcatccagggctctgacagcgtcttctccggcttcctgctcttccccgactagggcgggcagatgcgctcgagccccacgggccttccacctccctcagcttcctgcatggacccaccttactggccagtctgcatccttgcctagaccattctccccaccagatggacttctcctccagggagcccaccctgacccacccccactgcaccccctccccatgggttctctccttcctctgaacttctttaggagtcactgcttgtgtggttcctgggacacttaaccaatgccttctggtactgccattcttttttttttttttttcaagtattggaaggggtggggagatatataaataaatcatgaaatcaatacaaaaaaaaaaaaaaaaaaaaaaaaaaaaaaaaaaaaaaaaaaaaaaaaaaaaaaa

SEQ ID NO: 87 - DNA, 641 bp, Homo sapiens
tcgacccacgcgtccgccatccggcccgagattagggaggattgactgtgtcagggatggcgggtggcctctctcgctgccagggcccttgtcagagcagccaggctggacagacggcctccctcctctccatctgaccggcacctgctgcttcggggcttaggccaccgctccctgtccccagaggagatagccccagatggactggaatgttgtggcatgagagcgcatgtgtgcgatggccccgctgtggtcccctctctgtccctccatctgtatgtgttctgtgtcccttgcatgtgtgcgtgttagagtgagcgcgtatgcatcaactcattgggctcttggctgctcacaaggcaaatttgacttggaaagactttcatctccttggaaccaagacttcctgagtccccctcaccctggccctgttccaccatggttatctgggtattggggaatggaaactttgggggagtgactttttaaagagacacttataatttctactactgcactactgtccattgtgggatgattaaacatggtatttaactgtgaaaaaaaaaaaaaaaaaaaaaaaaaaaaaaaaaaaaaaaaaaaaaaaaaaaaaaaaaggacgaacagaccaaaaaaaaagg

SEQ ID NO: 88 - DNA, 1524 bp, Homo sapiens
gaattcccgggggaagaacagcgctcccgaggccgcgggagcctgcagagaggacagccggcctgcgccgggacatgcggccccaggagctccccaggctcgcgttcccgttgctgctgttgctgttgctgctgctgccgccgccgccgtgccctgcccacagcgccacgcgcttcgaccccacctgggagtccctggacgcccgccagctgcccgcgtggtttgaccaggccaagttcggcatcttcatccactggggagtgttttccgtgcccagcttcggtagcgagtggttctggctttaccttgtgggggtcagaatattcgtggaactggaatgccatagatgaggggcccaagagggacattgtcaaggaacttgaggtagccattaggaacagaactgacctgcgttttggactgtactattccctttttgaatggtttcatccgctcttccttgaggatgaatccagttcattccataagcggcaatttccagtttctaagacattgccagagctctatgagttagtgaacaactatcagcctgaggttctgtggtcggatggtgacggaggagaaccggatcaatactggaacagcacaggcttcttggcctggttatataatgaaagcccagttcggggcacagtagtcaccaatgatcgttggggagctggtagcatctgtaagcatggtggcttctatacctgcagtgatcgttataacccaggacatcttttgccacataaatgggaaaactgcatgacaatagacaaactgtcctggggctataggagggaagctggaatctctgactatcttacaattgaagaattggtgaagcaacttgtagagacagtttcatgtggaggaaatcttttgatgaatattgggcccacactagatggcaccatttctgtagtttttgaggagcgactgaggcaaatggggtcctggctaaaagtcaatggagaagctatttatgaaacccatacctggcgatcccagaatgacactgtcaccccagatgtgtggtacacatccaagcctaaagaaaaattagtctatgccatttttcttaaatggcccacatcaggacagctgttccttggccatcccaaagctattctgggggcaacagaggtgaaactactgggccatggacagccacttaactggatttctttggagcaaaatggcattatggtagaactgccacagctaaccattcatcagatgccgtgtaaatggggctgggctctagccctgactaatgtgatctaaagtgcagcagagtggctgatgctgcaagttatgtctaaggctaggaactatcaggtgtctataattgtagcacatggagaaagcaaatgtaaaactggataagaaaattattttggcagttcagccctttccctttttcccactaaattttttcttaaattacccatgtaaccattttaactctccagtgcactttgccattaaagtctcttcacattaaaaaaaaaaaaaaaa

SEQ ID NO: 89 - DNA, 1810 bp, Homo sapiens
ccacgcgtccgtacatgctggccagctgaaaaatggagactttcatttcactgactgtttattttttggttcactgatgtctgctacagatccagtgacagtgctggccattttccatgaactgcacgtcgaccctgacctgtacacactcttgtttggagagagtgtgttgaatgatgcagtggccatagtccttacatattctatatccatttacagtcccaaggagaatccaaatgcatttgatgccgcagcattcttccagtctgtggggaatttcctgggaatcttcgctggctcatttgcaatggggtctgcgtatgccatcatcacagcactgttgaccaaatttaccaagctgtgtgagttcccgatgctggaaaccggcctgtttttcctgctttcttggagtgccttcctgtctgccgaggctgccggcctaacagggatagttgctgttctcttctgtggagtcacacaagcacattatacctacaacaatctgtcttcggattccaaaataagaactaaacagttgtttgaatttatgaactttttggcggagaacgtcatcttctgttacatgggcctggcactgttcacgttccagaatcatatctttaatgctctttttatacttggagcctttctagcaatttttgttgccagagcctgcaacatatatcccctctccttcctcctgaatctaggccgaaaacagaagatcccctggaactttcagcacatgatgatgttttcaggtttgcgaggagcgatcgcatttgccttagctattcggaacacagaatctcagcccaaacaaatgatgtttaccactacgctgctcctcgtgttcttcactgtctgggtatttggaggaggaacaacccccatgttgacttggcttcagatcagagttggcgtggacctggatgaaaatctgaaggaggacccctcctcacaacaccaggaagcaaataacttggataaaaacatgacgaaagcagagagtgctcggctcttcagaatgtggtatagctttgaccacaagtatctgaaaccaattttaacccactctggtcctccgctgactacaacattacctgaatggtgtggtccgatttccaggctgcttaccagtcctcaagcctatggggaacagctaaaagaggatgatgtggaatgcattgtaaaccaggatgaactagccataaattaccaggagcaagcctcctcaccctgcagtcctcctgcaaggctaggtctggaccagaaagcttcaccccagacgccaggcaaggaaaacatttatgagggagacctcggcctgggaggctatgaactcaagcttgagcaaactttgggtcaatcccagttgaattaattggcatgaagagtacagatgtaatcacaagtaatgcaagactcactgaggaatacaagccaagctgatgaggcagtacaggggagaggctggaaaacatattaagagcataaattggagagaatcaaagccttgtcacatggatcctggtgcctgaagaaatgagattttattatccctctctattatgcaaatgaatttagttttttgacagcagccattctgattactggattggctggggtggggatggaggtatcaggagtctagctgctggaggatgggacagctgtgctgggtcttcagggcatttctgctgcgaatgcggctctccaggcccttcacttctattctggattttattccctccattaaggagagtttaaaaataaaagaaagcttctgagagtaaaaaaaaaaaaaaaa

SEQ ID NO: 90 - DNA, 1617 bp, Homo sapiens
ctgcaggaattccctaagcactttcacctctgttaccttgttgaacatgatctctattgcatttcatgccccttaagacagtttcataattatgaaaatagttgttagggattttccaagggaacaacatcagtatttacacaaggaaggcctttgtatttttaaaatttctactgtagctataattggttcccattgttatttctaatactataaatttgtgcattctttttctttatccacttttatggaagatggtgtgttttaataacttttttttaacttagcttttgattttggatattttgctcattgattaccagtgattttttcttttcttacaggagcttttaagtccacagtttccctgtgcatagtgctttagctgactcctaaaagttttgctatgcagtggttgttaatcactcccaggcttttctactttccattattacttctgtggcttgtgagtgttaaatttctttttattttcatttttggtgatgggcagggtcttgctccatcactcaggccggagtgcagtggtgcgattatggctcaccacagccttgacttccaaggcttaagctatcctcccaccttagcctccgcaggagctgggactacaggcatgcaccaccatgcccagctaatttttaaatttttttatagagatggagtctcgctctgtggcctaggctggtctcaaactcctggacacaagtgatccacctacctcagactcccaaagtgcttggattacaggcgtgagccaccacacctgggctaaatatttatagaacagtttttaaagttatctttaaaagtttacttttaatttagttatattgtgtcagagaatattatctgtttgaaatagattcattagattggtcaagttttgctatgcatagttaattttgtaaatattccacatacgcttgaaaacaatatatgttttctaagtctggtatgcagggttatagtaagtacagcaaatttaacattttaatttggggcttcacatttcctccattgtaacacattttgcatctgcaggtctgcaggcagagataacctggaaaggtacattagacaaggcacctggtactctttttgcctgttgcaaaattgttcacaattttttttctgatactccaaatacttcagatttatttatttatttatttatttattgagacttgttgagtcttgttctgtcacccaagctggagtgcagtggcatgatcttagctcactgcagcctccgcttcgtgggttcaagcgattctcctgcctcagcctcctgagtagctgggattacaggctcccgccaccatgcccggctaatttttgtatttttatttgagacagggtttcaccatgttggccaggctggtctcgaattcctgaccccagatgatccgcccctctcagtctcccaaagtgctaggactgtaagcgtgagccactgcgccctgcccaaatacttcagatttatatcaccacatacaagaattgtgcactttcatgaactattggaacaggtctgtaagtagcaaaaaaccaaaaaaaaaaggaattcgatatcaagcttatcgataccgtcgacctcga

SEQ ID NO: 91 - DNA, 758 bp, Homo sapiens
tcgacccacgcgtccgcccacgcgtccgcccacgcgtccgcgcctagcgtttggggaggaacagggagagagcttcggggcgtctgtctccgtgctctcctgcctccaccgccttggttttgcttcctgctggaggcagggcacctgctgcgacccagattcttctgcaggatgtgtctgtctttgtcacggtggacagagggtgacatcataggagcagctcgctggccagaaggggatgggggcatccctgtgcctcactcagctcctgctgctcttagggaaaggaggcctgggtcaagccagcatccccttggtaaagacccccgcaggccaccaggcattctggacacgcacacacacacacacacacacacacacacacacaaaacttcacagcaggccagctgcagtgacttgtcatcaagagtcacctcagctgcgcccccctcccatcctttcctatgagaagccactgctttgggggcgccggctagaaaaagtagggtgcggtggccaggagggcccctgccgcgcggggggctgggtctggttgagtcgctgctttcccgagggcagcgcagggatccggggaagctgcggcagggagcgggcgccggcttcgtggctctgaggtgtaacgggggtgggctccctccctcggaggacatcgtctgtgtccaggtcagaaagtggcccaggaagggggcagtttctgtcgcgggtccggtgggggcgcggccgctctagaggatccc

SEQ ID NO: 92 - DNA, 2152 bp, Homo sapiens
ccacgcgtccggcaggagtgtatgtgagtgtgtgtgtgcatacatgtgtgtgtatgtgtgtgcatacatgtgtgtgtatgtgtgtgcatacgtgtgtgtgtgtgcatgcatgtgtgtgggcgcatgtgtgcatgtgtgtgtgtgagtgtgtgtgttggggaggaggcatggcccttgggaaggtctgtccaggttggaagccacactccctcccctcagcatggaggtgggcgtgtgcgtggaggcctatcgccaggaggctgagacccaccggcgccacatcaacagtgcctttatgacctttgtggtcctggacgcagatgaccagccccagttgctgccctggattcggccccagcccggcgatggtgagcggcggtaccgagaggccagtgccagaaagaagatccgcctggacaggaagtacatcgtgtcctgtaagcagacagaggtgcccctctccgtcccctgggaccctagcaaccaggtgtacctgagctacaataacgtctcctccttgaagatgcttgtggccaaggacaactgggtgctgtcctcggagatcagtcaggtccgcctgtacactctggaggatgacaagttcctctccttccacatggagatggtggtgcatgtggatgcagcccaggccttcctgctgctctcggacctgcgtcagaggccagagtgggacaagcactaccggagcgtggagctagtgcagcaggtagacgaggacgacgccatctaccacgtcaccagccctgccctcggaggtcacacaaagccccaggacttcgtgatcctggcctcgaggcggaagccttgtgacaatggggacccctatgtcatcgcgctgaggtcggtcatgctgcccacacaccgagagacgccagagtacagacgcggagagaccctctgctcaggcttctgcctctggcgcgagggggaccagctgaccaaggtatcctactacaaccaggccaccccaggtgttctcaactatgtgaccaccaacgtggccggcctctcctctgagttctacaccaccttcaaggcttgtgagcagtttctcttggacaaccggaatgatctggcccccagcctccagaccctctagatgccctcagtggccacatcatgcccactcccactccatcctgtccccaaggactcacatacagtgcctggagaaagccaaagacctttatttcttcctgcctccccgtgggaagcctccgccctgaggtccgctggcccaccacccctgggtgctcagtttctaccaacatgagccagcaagtccttgtggtagccctggggtagcctgtagtagactcgggtcctgtccacagccctagctgccagcaatgctgtcctcacagaggcatagtcgcccccagctgggttgtgctccactgtgacggtggcccggggggaggatgccagcagcctgcctatggctccagctgtgctgtggcccagcagcatggcctgcatctggaaggacacaggttgccagagcccctggcacaactctagcatatctgtgagcagctgttccctgtagccactgcccagcacctcctcaggccagcctggtgccacagtcacgtgggggaagacctcagccacagctgtaagcagctctctgccagccacatggccggggaccgaaaaactcccgtgggagattttggccccaacccacacaggccaatgcaagaggccaaggctggagaggcgtgccagcaaggccagggatggccggagggctgcgggctccgctatttgcaaatggatgccccagtgtccgggatgtgtggccagctgctgcaggcaggactccagcgtcaggatgttgccacttggagtatgaacaatgggcacggggttttcagccacagttccctcgaggccagtgttcagcaggatcatgccttctgtgtctggaagaggcggcagaggcaacagtgtttaggatttgggttatcataaggtgttaagagtcccttgttaaaggggcagtgggagttatggggtcatcaaggaccttgcctctctggaatctgtcaacccagttttgggctccaggtggatgggttgctttataaatgtgcctggtgcatgagaaaaaaaaaaaaaaaaaagg

SEQ ID NO: 93 - DNA, 758 bp, Homo sapiens
ggcacgaggtgtgggtgggcaaggccagggccactgccaggtggggtccgtggccctgagcccccagctctatgcaccccccacctggggtctggcttctccatctccacacccccttgaggggcttctgtctccccctgccccttcgatcgcaggaggcagtgcctggccggggtcgcaggcacctgtcaccccagctcctcactcctcacccactcacatccagtccgtttgtaaaatacacccaggatgagacctgcacgcagtggcttacagcagcacgatttgtgacagcccgaggcggagaacaccgaacacccagtgaaggtgaggggatcagcacggcgccgccaccgtgctggaacgagactcagccacaaggaggtgcgaagctctgacccaggccacagtgcggatgcaccttgaggatgtcacgctcagtgagagacaccagacacagaagggtacgctgtgatcccacttctatgaaatgtccaggacagaccaatccacagaatcagggagaggattcgtgggtgccgggactggggagggggacctgggggtgactaggtgacataatggggacagggctgccttctgggtgatgagaatgttctggaatcagatgggatggctgcacggcgtggtgaaggtactgaacgccacctcactgtaagacggtagattttgtattttaccacaataaacaaaacaaaacaaaaaaaaaaaaaaaaaaaaaaaaaaaaaaaaaaaaa

SEQ ID NO: 94 - DNA, 1116 bp, Homo sapiens
gcaggagagtagttatagaccctcaagagaaacccagtgaggagccccttggggaccgaaggactgtcattgacaaatgctctccacccctagagttcttggatgactctgactctcatttagaaatccaaaagcataaagatagggaggtggtgatggagcacccctcttctggaagtgactggtctgatgttgaggagatctccacagtcagattctctcaggaggaacctgtctccctgaaaccttcagccgttccggagccttcttccttcaccaccgactatgtcatgtaccctcctcatttgtacagtagtccttggtgtgactacgccagctattggaccagcagccccaagccttctagctacccctccacaggcagcagcagcaacgatgcagcccaggttgggaagagcagccggagccgcatgagtgattattcccccaactctacagggagtgtccaaaacacctccagagacatggaggcctcagaggaaggctggtcccagaattctcgttcatttcgcttctccagaagctcagaagaaagagaggtgaaggagaaaagaacattccaagaggagatgcctccgcgtccttgtggaggacacgcatccagctccctgccaaagagccacctggagccaagcctagaggagggcttcattgacactcattgtcacctggacatgctctattccaagctatctttccaagggacctttacaaagttcagaaaaatttacagcagctccttccctaaggaatttcagggctgcatctctgacttctgtgttagaggaggaaaagcggagatgacatggaagtctccaagcctgtgccatccacctgccaaggaaaagcacaaggtgctatctacttttctctctaggatttagattatcatttatgtgctgttgcacagtgaaacctcacctgtgtgggcgtgaaagctgattggcattgtttttgattcagctttttggatggctaattgttttcactgtgctgtgggaatgcctctgtattttttcccctctttggccatctttttctgaaaataaagtgatggatcctctagccaaaaaaaaaaaaaaaaaaaaaaaaagg

SEQ ID NO: 95 - DNA, 724 bp, Homo sapiens
  SITE (1): n equals a,t,g, or c
  SITE (2): n equals a,t,g, or c
  SITE (3): n equals a,t,g, or c
nnnggcacgagatcttttgcaagccttaaggcaccctaaggctgtggcatttggagaaatgggcttggattactcttacaagtgcaccacgcctgtcccagaacagcacaaggtatttgagagacagctgcagctggctgtgtctctaaagaagcccttggtgatccactgccgagaagctgatgaagatctgctagaaatcatgaaaaagtttgtgccccctgactacaagatccataggcattgcttcaccggcagctacccggtcattgagcccctgctgaagtactttcccaacatgtctgtgggcttcacggcagtgctgacatactcctctgcctgggaggcccgggaagccttgaggcagatcccactggagagaatcatcgtggaaacggatgctccctatttcctccctcgccaggttcccaaaagcctttgccagtatgcccacccgggcctggccttgcatacggtccgagagattgccagagtcaaagatcagccactctccctcaccttggctgccttgcgtgagaacaccagtcgcctctacagtctttaagcagagaaggtacagtcctcgggagtctcctagaaaaggtcgtaaaactcacattctgtattttttaaaaaccaggacaagtcttttgttgcattttgttaatgtaaagaatataaacatagtatgagcattaaaaaaaaaaaaaaaaaaaaaaaaaaa

SEQ ID NO: 96 - DNA, 636 bp, Homo sapiens
ccttgccaactctgcctcttcccccgctgactggggtatcagtttatggtgccctgcaggaagaccctcttgttcctgtgggtgggaagcctctgcagagatgtgggcagctggtcaggatggccattcgggctcagcacagcaacgcagcccagactcagactggggaagcaaacaggggctggacaggccaggagagcctgtcggacagtgatcctgagatgtgggagttgctgcagagggagaaggacaggcagtgtcgtggcctggagctcattgcctyagagaacttctgcagccgagctgcgctggaggccctggggtcctgtctgaacaacaagtactcggagggttatcctggcaagagatactatgggggagcagaggtggtggatgaaattgagctgctgtgccagcgccgggccttggaagcctttgacctggatcctgcacagtggggagtcaatgtccagccctactccgggtccccagccaacctggccgtttacacagcccttctgcaacctcacgaccggatcatggggctggacctgcccgatgggggccatctcacccacggctacatgtctgacgtcaagcggatatcagccacgtccatcttcttcgagtctatgc

SEQ ID NO: 97 - DNA, 1204 bp, Homo sapiens
  SITE (1187): n equals a,t,g, or c
  SITE (1196): n equals a,t,g, or c
ggcacgagagagcctggggccagagggccagacagccacagagctcctggcgtgggcaaggctggccaaggatggcgacgcccagkggcctgggggccctgctcctgctcctcctgctcccgacctcaggtcaggaaaagcccaccgaagggccaagaaacacctgcctggggagcaacaacatgtacgacatcttcaacttgaatgacaaggctttgtgcttcaccaagtgcaggcagtcgggcagcgactcctgcaatgtggaaaacttgcagagatactggctaaactacgaggcccatctgatgaaggaaggtttgacgcagaaggtgaacacgcctttcctgaaggctttggtccagaacctcagcaccaacactgcagaagacttctatttctctctggagccctctcaggttccgaggcaggtgatgaaggacgaggacaagccccctgacagagtgcgacttcccaagagcctttttcgatccctgccaggcaacaggtctgtggtccgcttggccgtcaccattctggacattggtccagggactctcttcaaggtgaggactcagggaagctccaaggttaagtgctaggtcctctgggggctccatgccacagtttgctgtcactggagcctgccgagggatccaatggggacagagcaggcagtgagcctcttagtgtttctaatgcagcccgtggccatctcagacacctgtcactagagtctatggtcttcagactcacactggtcacacgctctcagatgtttgacccccacacatgagtgccctttggcttgtctatgtgtcctgtgggtgctcgtgtgctctgtgtgtcctcgtgcatgcacaaacatgcacatccttttctattcttgtgcacgcacaagcccatgtactcagctgtgatcatatccacacgagcaagtgtacccatgcccttgcacatgtgtataccaggtatgtgcacccagaggtgtgcatccactcctgtgcagacgtgtgtacccctgagggctagtgtgctccccccaccagcctcctttctaccgaatgcacactcacgctaagaccctcaggggcacgctatcctccccgctgacttccatttcttggctgatcttggccccatgcccccttttmscttttaaagggtttttaaaaagggaaggggggggncccaaaggnaaaggggg

SEQ ID NO: 98 - DNA, 1117 bp, Homo sapiens
gcgaggaccagctgwcctggttcgctgccctggtcaagtgcctgcccgtcctctgcctggctgggttcctgtgggtcatgtccccaagcgggggctacacccagctcctccagggagcccttgtgtgctcggctgtgggggacgcttgcctcatctggccggcagccttcgtccctggcatggccgcctttgccaccgcccacctcctctacgtctgggccttcggcttctctcccctgcagcccggcctgctgctgctcatcatcctggcccctggcccctacctcagccttgtgctccagcacctcgagccggatatggtcctgccggtggcagcctatgggctgatcctgatggccatgctgtggcgcggcctggcccagggcgggagtgccggctggggcgcgctgctcttcacgctctctgatggcgtgctggcctgggacaccttcgcccagcccctgccccatgcccrcctggtsatcatgaccacctactatgctgcccagctcctcatcacactgtcagccctcaggagcccggtgcccaagactgactgactagggagcttgaagggccggtgttcaggccctctcctcctgcaaggacctgggcctcccagcccagcccmgcctgagaaataccctcagcagcgaagcttcctgacgcctgtctgcaggcgcygctgccgccgtcgcttctggctgaagacgtttgaggacgatttgcggaattccaagtccactactgggttccagctgccttcccccggttctgactccagatccctggctcctcagccaggcccacatggagccctcccagccaccagcctgcctccatgttcactgtcggccccacagcctgcccgccccctgctgctgctctgaatccgttttccctgtgggtgtggaaccgtagatgttgctgttaccgtaggagaggcctcggggagggtcatcattgtgataaaccatcgcggttaatgacagcagaaggttctttgtcgctccccatggaccaggcctggtgcccagtgggaccctccatggccctctggtggggggattcggggggataaagtgaggattgtgcagaactgaaaaaaaaaaaaaaa

SEQ ID NO: 99 - DNA, 1092 bp, Homo sapiens
cgaattctgctcagctcgctttggcagcttggtgggcggtgggcgcgggtggcggaggcgattgaagctgctggcccagcatgtggtgcgcgagcccagttgctgtggtggccttttgcgccgggcttttggtctctcacccggtgctgacgcagggccaggaggccggggggcggccaggggccgactgtgaagtatgtaaagaattcttgaaccgattctacaagtcactgatagacagaggagttaacttttcgctggacactatagagaaagaattgatcagtttttgcttggacaccaaaggaaaagaaaaccgcctgtgctattatctaggagccacaaaagacgcagccacaaagatcctaagtgaagtcactcgcccaatgagtgtgcatatgcctgcaatgaagatttgtgagaagctgaagaagttggatagccagatctgtgagctgaaatatgaaaaaacactggacttggcatcagttgacctgcggaagatgagagtggcagagctgaagcagatcctgcatagctggggggaggagtgcagggcctgtgcagaaaaaactgactatgtgaatctcattcaagagctggcccccaagtatgcagcgacacaccccaaaacagagctctgatctccaatgccagcacatttgtgacttgtaattagagagaaaagtgactctctaggatatggacatgttgattaaggataactgggaatgcatcatatttggtctcatgctttttgtgttggtattattcctcagaattttgttacgtgggtttatgagtgaaactaatactactgataacttacatttgcagtgtaccaaaagctaaaagttcctttctcataagtttcttggaatgactatgccagttttcattgcctgtctcctaaaagtgacctactgacaaattgatggagtaaattgattccaagaaagaagaaggcattcagagactcctctctggatgcaattttaaaatatattggactaaaacaaaagacacaacagtcagcttatctaatgcacaacttcaatcccaaatacagaatcaaaagtttttttcaagtga

SEQ ID NO: 100 - DNA, 1450 bp, Homo sapiens
  SITE (1374): n equals a,t,g, or c
  SITE (1415): n equals a,t,g, or c
  SITE (1418): n equals a,t,g, or c
  SITE (1426): n equals a,t,g, or c
  SITE (1439): n equals a,t,g, or c
agcggccgctgccctgacccgacgggtatcagccggctctccccctccacccaggacgacatgaacgaccgaggccagggagtcctctccttgggcctctgcatccccccatccttggctctggggtaggcccagggaggagacacccccaacccctatccggtctgtcctggagaaaagagactgcccttccatgcccctgagtgaggggcctggggcccaggctgcctgtgttccccaagggcaagggtctctctgttgaggaggaggggcctgtcagccacaacttctttcctcctgagcgccccatctccctctctgcaccctgcaattcccacccctccgtatttatttccctggtcccgccgacagtccctccttgtctgtctccgggattcaggcctccctccctgacatggagagtaacctgtctggcctggtgcctgctgccgggctggtgcctgcgctgccacctgctgtgaccctggggctgacagctgcctacaccaccctgtatgccctgctcttcttctccgtctatgcccagctctggctggtgcttctgtatgggcacaagcgtctcagctatcagacggtgttcctggccctctgtctgctctgggccgccttgcgtaccaccctcttctccttctacttccgagatactccccgcgccaaccgcctggggcccttgcccttctggcttctctactgctgccccgtctgcctgcagttcttcaccttgacgcttatgaacctctactttgcccaggtggtgttcaaggccaaggtgaagcgtcggccggagatgagccgaggcttgctcgctgtccgaggggcctttgtgggggcctcgctgctctttctgctggtgaacgtgctgtgtgctgtgctctcccatcggcgccgggcacagccctgggccctgctgcttgtccgcgtcctggtgagcgactccctgttcgtcatctgcgcgctgtctcttgctgcctgcctctgcctcgtcgccaggcgggcgccctccactagcatctacctggaggccaaggggaccagtgtgtgccaggcggccgcgatgggtggcgccatggtcctgctctatgccagccgggcctgctacaacctgacagcactggccttggccccccagagccggctggacaccttcgattacgactggtacaatgtgtctgaccaggcggacctggtgaatgacctggggaacaaaggctacctggtatttggcctcatcctcttcgtgtgggagctactgcccaccaccctgctggtgggcttcttccgggtgcaccggcccccacaggacctgagcaccagccacattcctcaatgggcaaggtcttttgsctctygggncctacttcttttgaccggggcttgggcacttgkgaaaratnrangggcttgnttcttgggaaccnaaacccgggtg

SEQ ID NO: 101 - DNA, 764 bp, Homo sapiens
  SITE (636): n equals a,t,g, or c
  SITE (641): n equals a,t,g, or c
  SITE (733): n equals a,t,g, or c
  SITE (743): n equals a,t,g, or c
  SITE (764): n equals a,t,g, or c
tttctgctggtgaacgtgctgtgtgctgtgctctcccatcggcgccgggcacagccctgggccctgctgcttgtccgcgtcctggtgagcgactccctgttcgtcatctgcgcgctgtctcttgctgcctgcctctgcctcgtcgccaggcgggcgccctccactagcatctacctggaggccaaggggaccagtgtgtgccaggcggccgcgatgggtggcgccatggtcctgctctatgccagccgggcctgctacaacctgacagcactggccttggccccccagagccggctggacaccttcgattacgactggtacaatgtgtctgaccaggcggacctggtgaatgacctggggaacaaaggctacctggtatttggcctcatcctcttcgtgtgggagctactgcccaccaccctgctggtgkgcttcttccgggtgcaccggcccccacaggacctgagcaccagccacatcctcaatgggcaggtctttgcctctcggtcctacttctttgaccgggctgggcactgtgaagatgagggctgctcctgggagcacagccggggtgagagcaccagtatgtcgggcagtctaggctctgggagctggtatggtgccatcgggcgtganccggnctggtatgggggcagccagacgaagaccactcctctgtctctccagtgcagacagcgsacacacagcttatcaccaaacggtcctctccaanaaccagccancctactagctggcagtgtgcn

SEQ ID NO: 102 - DNA, 880 bp, Homo sapiens
  SITE (737): n equals a,t,g, or c
  SITE (805): n equals a,t,g, or c
  SITE (877): n equals a,t,g, or c
tcggagaagagataccctcagccacggggccagaagaagaagaaagtggtgaagtatggcatgggaggaatgatcatcgtcctgctcatctgcattgtctggtttcctcttctcttcatgtctttgatcaaatctgtggctggggtcatcaaccagcccctggacgtctccgtcacaattaccctgggagggtatcagcctattttcacaatgagtgcccaacaaagccagttgaaaattatggaccagcagagctttaacaaatttatacaagctttttctagggacaccggtgctatgcaatttctggaaaattatgaaaaagaagacataacagtagcagaactggaaggaaactcaaattctttgtggaccatcagcccacccagtaagcagaaaatgatacacgaactcctggaccccaatagtagcttctctgttgttttttcatggagtattcagagaaacttaagtctgggtgcaaaatcggaaatagcaacagataagctttcttttcctcttaaaaatattactcgaaagaatatcgctaaaatgatagcaggcaacagcacagaaagttcaaaaacaccagtgaccatagaaaagatttatccatattatgtgaaagcacctagtgattctaactcaaaacctataaagcaacttttatctgaaaataattcatggrtattaccatcatttgkccaragmcatacactaaattaacagtgagtggngggttttaactgatggaaccgattccatcgactttagcctggacggggcttatgcaagcagccccagntggtctgtgcatgataggatattctatgctggatggaatgccgatttagggattatctagtgaagtcagggnatt

SEQ ID NO: 103 - DNA, 1321 bp, Homo sapiens
ggcacgagggtgaggcccaggtagcgtttgcaatccagccccaccgtcacctcttttcttggacttctagttttcctcacccctattgccttcatccttttacctccgatcctgtggagggatgagctggagccttgtggcacaatttgtgaggggctctttatctccatggcattcaaactcctcattctgctcatagggacctgggcactttttttccgcaagcggagagctgacatgccacgggtgtttgtgtttcgtgcccttttgttggtcctcatctttctctttgtggtttcctattggcttttttacggggtccgcattttggactctcgggaccggaattaccaagggattgtgcaatatgcagtctcccttgtggatgccctcctcttcatccattacctggccatcgtcctgctggagctcaggcagctgcagcccatgttcacgctgcaggtggtcccgctccaccgatggcgagtcccgcttctacagcctgggacacctgagtatccagcgagcagcattggtggtcctagaaaattactacaaagatttcaccatctataacccaaacctcctaacagcctccaaattccgagcagccaagcatatggccgggctgaaagtctacaatgtagatggccccagtaacaatgccactggccagtcccgggccatgattgctgcagctgctcggcgcagggactcaagccacaacgagttgtattatgaagaggccgaacatgaacggcgagtaaagaagcggaaagcaaggctggtggttgcagtggaagaggccttcatccacattcagcgtctccaggctgaggagcagcagaaagccccaggggaggtgatggaccctagggaggccgcccaggccattttcccctccatggccagggctctccagaagtacctgcgcatcacccggcagcagaactaccacagcatggagagcatcctgcagcacctggccttctgcatcaccaacggcatgacccccaaggccttcctagaacggtacctcagtgcgggccccaccctgcaatatgacaaggaccgctggctctctacacagtggaggcttgtcagtgatgaggctttgactaatggattacgggatggaattgtgttcgtccttaagtgcttggacttcagcctcgtagtcaatgtgaagaaaattccattcatcatactctctgaagagttcatagaccccaaatctcacaaatttgtccttcgcttacagtctgagacatccgtttaaaagttctatatttgtggctttattaaaaaaaaaaaaaaaaaa

SEQ ID NO: 104 - DNA, 1558 bp, Homo sapiens
  SITE (1542): n equals a,t,g, or c
  SITE (1550): n equals a,t,g, or c
gcaaaggtgaagctggttttcatggtctcctgagggcccctggcccctgggagatgggtcacactccctgaatgctgtgctgttggtttccctggaggattcttgctgcaggccaggtcccgtattctccacactcaccacaagtggctgggtgtgacttgacacggtgtgaaagtggaggggcgcgagcactcagtatccagcgagcagcattggtggtcctagaaaattactacaaagatttcaccatctataacccaaacctcctaacagcctccaaattccgagcagccaagcatatggccgggctgaaagtctacaatgtagatggccccagtaacaatgccactggccagtcccgggccatgattgctgcagctgctcggcgcagggactcaagccacaacgagttgtattatgaagaggccgaacatgaacggcgagtaaagaagcggaaagcaaggctggtggttgcagtggaagaggccttcatccacattcagcgtctccaggctgaggagcagcagaaagccccaggggaggtgatggaccctagggaggccgcccaggccattttcccctccatggccagggctctccagaagtacctgcgcatcacccggcagcagaactaccacagcatggagagcatcctgcagcacctggccttctgcatcaccaacggcatgacccccaaggccttcctagaacggtacctcagtgcgggccccaccctgcaatatgacaaggaccgctggctctctacacagtggaggcttgtcagtgatgaggctgtgactaatggattacgggatggaattgtgttcgtccttaagtgcttggacttcagcctcgtagtcaatgtgaagaaaattccattcatcatactctctgaagagttcatagaccccaaatctcacaaatttgtccttcgcttacagtctgagacatccgtttaaaagttctatatttgtggctttattaaaaaaaaaaraaaaatatatagagagatatatatctatgccagaggggtgtcttttttaaaaattcttcttcattgctgactgaaactggcagatgattgaccagtatcctttgaccatctgcactttatttggaaggaagcaggggctgtccaccctgaaaaagagtgactgatgacatctgacttttgtcgatgggacttctcaagaagccattccttggagcttctgttacagctgtaaaccaaagtggagctggtgcttcttgggagcctcgccttacaactagttcctgcctttcgtccagtaccaagtcccccgttgcttctggtcagcccacttgtagacttccaggggacacatctttattctgtttcaggaaaccagtcacracacgtccacatatgtatttgtgtatgttaatgtccagtatcacatcacccatgaaagtcgtgggcagttcargagatacctgscttcgtctttgktctttgttgccttaggttcttcagagaaagatcmcaacaaaaaatgtacmctgtcgtttacagctawaagngatttganttgttttt

SEQ ID NO: 105 - DNA, 2079 bp, Homo sapiens
  SITE (1603): n equals a,t,g, or c
  SITE (1918): n equals a,t,g, or c
  SITE (1920): n equals a,t,g, or c
  SITE (1976): n equals a,t,g, or c
  SITE (1980): n equals a,t,g, or c
  SITE (2017): n equals a,t,g, or c
  SITE (2020): n equals a,t,g, or c
  SITE (2027): n equals a,t,g, or c
ttyaggtgacactatagaaggtacgcctgcaggtaccggtccggaattcccgggtcgacccacgcgtccgattcatagcagtatggactcatggatacatattttattctgtgggcaatacccgttactatcattatttgtttttcttggcttgaatattctcagacttgggctttgggtgcttcttgtagtttgccgcaatgcccttttgatgtgatgctatcattatttttagtacatccttactttccaacagtatgggatcatctttgttttccccatcccagtcctgaaagtagccctttctccaagtgttcactggttgcttggttggagaatggtgcataggaaccaagatctgagtgcaagggtgctcttcactgttgggatgtcattgcttctgggtgtgttggagccagcaaatatatatatgtacactaattcatgcatgcacacatttgcatttatttatacatctatccatctgcgtgtgtatacgtgtgtgtatatgtgttaccatgagttaataccaattactctgatttcaatccaacacaatgggttctttctaattatttttaatttctctcaaaatcacttcttctggktcttccagaaaatgagctcttcacctagcttaagaatgtagagatgycgtgkatggttgggcaggttgttcactgtccaagggtgttccagctgaggagagcgatgggagctgaaagcatccatgctctactccctaagctctgcactctaacatgtgctctgggtccaccagagtaagggatgccctcttttcacttgtgcaaatgcactgggtgagctagcaacagacctggtcgactgctgtctcgggatatttttgcgtttacttgtgaaacacccaggcttgggctggattcccccagaggcagattgtgagctgaggatttgagtgcgaggagtattttgggatgtgattccaggaacctcccagagagaagcagtggggagtcaggcaggaaagaaagcatgcgtcagggagctggktactactgggccaccgaggctccatcccagtaaggaaccctggaagacgggaggaacgcaccttggagttgcttycctaagggatcaacttcagttggtcgccactcaaggctcctcctgaggggagcaggcacagagtccctggcacttctggccctgagtgcccaggggatgagtgcgtgacattgacggcttctgctgtcctctgtctcctgctttccccgtgggatgaactagcttgagaggcacaagattcctgagcaggcagagggactctgtaggagtctcagagctcctgaggctgcaccctcgccctggagccccgtgaaatcttcaattttgggttttatgagcttcacaaaccttccaggggcctctccggctccggatggggtgcgttggaggcctggtgcccacgtgtctcctgggccctccacctgtgccccgcctgtttgcacagtgtgcgtgagctgagcacctgagtttgctctttgaatcaagtgkttaactcactcacggtaatagtggctgataattcttgagctaacacaccttctactttgcggsctanccttgkttgcctttcagccctggkttawtatcttccatcggatgaagcttargagcaccagcgctgcctarggaaaccctggcccytccttccctgggatcatctgggtcccccagggctcaggctttacaacccctgctgcttggttacccacctcccacctggggcccctgacagatcaggggacaagcagatagagggctcaccagtgcaagtccaagtgtatgctgccggcsggccggagcagagtgagtcaagatttggctttttataatcattcaggtgccarggtgggcacgccgtcctggggtcatncnttccagcgaagggctcacaatcataagcctggcacccagcaagtaaattcaagcanggangggtttaaattttccttcccttatggggaatcaagcnaangggcaancttggccttaaagcccccaaggcaccaacttgggcctaaagggcccggaccc

SEQ ID NO: 106 - DNA, 3144 bp, Homo sapiens
  SITE (3135): n equals a,t,g, or c
  SITE (3138): n equals a,t,g, or c
ggccgcggccgcctttgcccgaagcccggggacgaaccgacggaccgaccgcctggcgcacggacgcgggcgctcgctttgtgttcggggctagcgtckgcgaggcttgagcttgcagcgcgcggcttccctgctttctcgctgccggggcaagtgtcttcatgaacccagaggatgtccgggaagcactacaagggtcctgaagtcagttgttgcatcaaatacttcatatttggcttcaatgtcatattttggtttttgggaataacatttcttggaattggactgtgggcatggaatgaaaaaggagttctgtccaacatctcttccatcaccgatctcggcggctttgacccagtttggctcttccttgtggtgggaggagtgatgttcattttgggatttgcagggtgcattggagcgctacgggaaaacactttccttctcaagtttttttctgtgttcctgggaattattttcttcctggagctcactgccggagttctagcatttgttttcaaagactggatcaaagaccagctgtatttctttataaacaacaacatcagagcatatcgggatgacattgatttgcaaaacctcatagacttcacccaggaatatattccaatgcaagtcgagagcgatgtggcgttccattctcctgctgcactaaagatcccgcagaagatgtcatcaacactcagtgtggctatgatgccaggcaaaaaccagaagttgaccagcagattgtaatctacacgaaaggctgtgtgccccagtttgagaagtggttgcaggacaatttaaccatcgttgctggtattttcataggcattgcattgctgcagatatttgggatatgcctggcccagaatttggttagcgatatcgaagctgtcagggcgagctggtagaccccctgcaaccgctgctgcaagacactggacagacccagctttcgggaccctcccgcgtgccgaactgatcttcgagctgcatggacctaatcacagatgcagcctgcagtctcgcctaatggagctgccattaggggagtgtaaaactgggaaatgctgctcactgacagaattaaaaaaaaaaataaccagtatgaaagtcgttgcgccgtgaatctctactgtagccatgaatttatggacagttagatgcttaccaaaaaagaaaaaaagggagggtaggggacccagatgtacttgaatgtgcagaaaatacattcttgtcctcatcttccgtaattggagggctgggagaggcagctttgctcttcaccacaccttggacggaccaccttctttctgttccatggcctgaaggagtgcatctcctcaaagactcagcccctcacctgggagggcagtggtttgtgggcatccctccatgtacattttaggaaacacttgcaactctcatctgaagaagaaaacaactcatctttgggttcagattttgtgatggtattcagcaagtcacttgggcgagcacacttggtctatcctggaaagtctccttataagagaagttgtgtatttcatgtgcaccgagcaagggcattggaagacgtcatgaggctgtattttagcaggactgatcgtttttctaagtagacctgagctttgtttatcagtgaaattcaaggagaaaatgaggttaatgaagaggtatcagttaaatatccccttcttctcaccctgccaaaattagcagttggatttttggaaactctggaatattctgggtcattttgttttgtatgtttgttgtttttcgtcttccaaaggtgaaagctatgatacagttccacttaaattttagtgttttcttactcagctcaagcattaatttttgattaagtcttaatctgcatgacctgtgaatctgaatccatcatctccctttcctgccagcttttctacaaacattgaaatatgttatttggtcagcacttatttcctaggttcacagccttgggaggttgtggcatgtcctcccagtctggctgggaagagaccagctgtaccatccaaatgcttccctggtcttgatgatctcttccagagtcgatctgagtggccttttctgcaccctccccttctttctctttgaatggaattaaacccaatttggaaacaacattgacccagtcaaaagcttctaatggtttctttttcttcctccagttttagtttgcttttattaaaaaaagaaaatagtgcatggccatagctccttcagttctcttattgcagactaaccatcaggatggtatcaaagcacaaatactttggaggggaatgcgttgaactggggcaagtactctgtaacacaaagtgggaaaccacttcctggtgctgccgctcctgcccccactttaggtgggagggacgagttttgccctctagattttaatccagctggtgtccaccggatgttgccctcctggggagcagatatcagtctgtggaactctgggaaaaccacaggcacatttttcggtgcggacagatttgccagcacataactgggcagccagctagaatactttgtggaaattaagcgaggttttccatttcagccccatggtgcatggtggtggccgatgaatgtgtcagtctgctcagagaaaggacaaaaaggaaattattttcaaaactgtgttcactgtttgggtgtgtgtatggctctgcatgtgtgtgtttttgtctctgtataggtagaggtattcacatcttactccgactgtaaggttgtcttacttcatctctgcccccaccacagttgccattttgtaatgtccttccaacatggagaagacacgagctctctccagttggcatcatttgtcttttttgttgattgcctcattctccagtgaactccatctggccaattgattcagaatcaggcaagatccctgccctttggcacatccactgaaaggccaaacagcaagtccgagtgagttttaaatattaattaatcaccctttattttttacacttgagagtgattgtaataaaggctgtcattaataaacttggttctaccttaaaaaaaaaaaaaaaaaaaactcgacgggggggccctgtacctcaattcgcccctatagtgagntgnctcaaa

SEQ ID NO: 107 - DNA, 843 bp, Homo sapiens
  SITE (1): n equals a,t,g, or c
  SITE (2): n equals a,t,g, or c
  SITE (3): n equals a,t,g, or c
  SITE (9): n equals a,t,g, or c
  SITE (671): n equals a,t,g, or c
  SITE (695): n equals a,t,g, or c
  SITE (841): n equals a,t,g, or c
nnnaacgcntgtttacaacccctgctgcttggttacccacctcccacctggggcccctgacagatcaggggacaagcagatagagggctcaccagtgcagtccagtgtatgctgccgggcgggccggagcagagtgagtcagatttggctttttataatcatccaggtgccagggtgggcacgcgtcctgggtcatccttccagcgagggctcacatcatagcctgtcaccagcagtaattcagcaggagggtttagtttcctccctatgggatcagcgagggcagctgtctaagccccaggcacactgcctagggcggacgtgggggtgggggccgtcctcctagggctgccctgctcttggcaggtgatcagccttcacctccttgtgtggtttaggggggctgcctcctgtctatgtcagagggcttctcagaaacaggcaccgctgtaggggcagcaagatgacttcacttggaaaatggaatgtacttaaacgagatcaagccacctcgtggagaagccattcccttccaatttggtttaatcctgctgattattgcaaagagaaagacttagcctggtgctaatgagtctttaatgcctctgaggacttctaaggtttccttttttttctaaacaagaaaaggtaagcctcaagctggtcattcntctaagttggaatttaataaccgnggtttggtttcataagaatttaacctttggaagttggttaattcattgggaagggccttctgggtttttcaattttgggggaagtggattaggaaagtttttccatttaaaattaaatttaatgggataaaaatttttttacccgngg

SEQ ID NO: 108 - DNA, 613 bp, Homo sapiens
ggcacgagtgactctattcatgctattttagatagcatgaattggtcagcttcatagtgtatattttctctattccattaaatttaattaatttcatttgattttattctgttcttcaggaatcttagtttttatatagtccaactcatgtactctgcttccgtcattaagaattcatagtgggagaaataggctgttgccttttctctagaatgcatggggcaaggctgtttgtttgtttgtttgtttgctttagacagtcttgctatgttgcccaggctggagtgcagtggcacaatcacagctcactgcaacctctgtctcccgggttcaagagattcttctgcctcaacctcccgagtagctgggattacaggcacatggcaacatgcccctggctaatttttgtatttttagtagagatggagtttcgccatgttggccaggctggtcttggactcctgacctcaagtgatctgcctgccttggccttccaaagtgctgggattacaggactgagccaccacgcctggccagggcgttttcttaaaaaagtgattgaaatctgctcatgccctgtgccacgtgggtctcacgcaggtctgttctctgc

SEQ ID NO: 109 - DNA, 945 bp, Homo sapiens
gggcacgacacctgcttcatttgcgcagtctgccatgtgaatctggaggggcagccgttctactccaagaaggacagacccctgtgcaagaagcacgcacacaccatcaacttgtaggcggccaaggccgcctgtgctgacgaggcccggagctgctcctgctgctggcaacaaaggattcgggaggctgatgtttcttctgaggggaatggggagagagaggaagcgactgagccctttggaagtataattttaggttttttcttctgtacacagatcgtgcatttgcatagttcagactaggagccaaatgaagactcaaaaccaagctagttattaatccaagactggaattgtacttcagacatttagagcagaattccaagaactcaaaagtgaaaagcaacaagcagctttcccaaagcgatacacttgctttggtcaccagaggaggacagagcttagagcagctgtggagaatctgaagcattctgcggagttcttaagcgctcccctggcaaacaaattgaagtgccaaacagcactcgctgcagggtatttttagagtcatagctgagagcttgttagctaagacccattgggctttcctcaccaaaaaaggaagtgttattccattactagcgtcatggagctacctctgcgcatcagacttcagaccttgaacaaacttaaaaccttcttgggagcccggacgtccaaagagatgtcttctgggagccactgggcaattgccagggctccaggaagggctctggctcaggttgcagacagctgagaaaagatggccctgtcagccaccctctctcagtctgaaacatccaacatccccagaaggcttagctcctttttgaattgtgatgggaaagtagagttgggtttttcctcgtgccgaattcgatatcaagcttatcgataccgtcgacc

SEQ ID NO: 110 - DNA, 450 bp, Homo sapiens
gaggcctgagagccgggcaagggctgtcgcacatgcgccttgagggaagatggcacctgccggctgctgctgctgctgctgcttctggggcggcgctgtggccgccgckggcgccgcccggcgtgtcctgctgctgctgctgctgggggwcctgtccgcccggctgcggccaggcgccctggccaccgagcactactcgccgctcgccctgctcaagcaggagctgcakcaccggcagcagcaggaggccccgscgggcggcggcggctgcagcccgcagtccggggactggggggaccagtactctgccgagtgcggcgagtcatcctttttgmacttccatgactcagactgcgaaccccaaggatcatcaccctgtgactccttgctttccctcaacactgcgaagattctgagccaggccaagtctattgcagaacagaagagatt

SEQ ID NO: 111 - DNA, 773 bp, Homo sapiens
  SITE (731): n equals a,t,g, or c
tggaagctaaaacacagggagctggtgggttgggtgggggcagataatgatatgcatacaaattagagggtctatgcaaatgagcattgctgcagtgtggctggagggaatccttagttcctaggattctaggatatgggtttcgaccccagaggtgaatgtattgttattattgttttgttgttgttgtgaatgacaagtcaaaatttgtgggttattgttgttatcgccaatagtattcttgtcattgttgcacagtacagagatgaaggaaacagattttgcaatcagatgatcctgggttctgagtccactctgccactcaccagctatatgacctccagcaatttccatcacctctcaatgcttcagtttccccatcggcaagatggttgtggggggagaggaacaacagtacagattcaccatcccaaattcaaaatgctccaaaatctasgccggscgtggtggctcatacctgtaatcccagcactttgrgaggtcaaagwggacggataacctgaggtcaggagctccagaccakcctgrccaacatggcgaaaccccatctctactaaaaatacaaaaaattacctgggtgtggtggggggcacctgtaaccccagctactcgggaggctgaggcaggaaccctggaggttgaggttgcagtgagctgagatcacaccactgcactccagcctgggtgacagagcaaggctcccatctcanaaaacaaaaaaacatgctccaaaatctgaaactctttgagcc

SEQ ID NO: 112 - DNA, 830 bp, Homo sapiens
  SITE (15): n equals a,t,g, or c
  SITE (51): n equals a,t,g, or c
caaaaaacatgttcnaaaatctgaaactttttggagcccaagtgtgatgcnacaagtgggaaattccacaactcatcacrtgtgatagattgcagtggaaatgcaggcacacaccacgaagtttactcagcatcctcaaaggaaatccccgtcagtagctatatatcattttctcacatgccagataggtatctctcatcttttactgttaggtacttctgtgttgaataggtggaggaaaatgattgctggttagtagtatataaattcagagtcaggaaggatggtgatgtcggctgggtgcagtggctcatgcctgtaattccaatgtgataccctaccttgtgtttaacgtgattgacyctcccttagctgagarrgccagrcagactcyattttggctycttcryttgcagtcyctcacccaccccccttcctcaaggacttaagctgactcccagcacatccaagaatgcgattactgataagatactgtgacaagctatatccacarttcccaggaattcgtcyggttgatagcacccaaagcccccgcgtctatcaccttgtgatasatttaaagcccctgcacctggaactgtttgttttyctkttaccatttatctttttmaytttcttgcctgttttgcttcyrtaaaattgcttcagctckgctccctcytccccttctaaaccaaggtataaaaagaaacctagccccttcttyggggtgagagaattttgagcgctagccrtctctcagtcgccggctaataaaggactcctkaattagtctaaaaaaaaaaaaaaaaaaaaaaaaaaaaactcga

SEQ ID NO: 113 - DNA, 646 bp, Homo sapiens
cttgtgagcaggtgaagctcatctaactaggcatttctatgatgtggctgcttttaacaacaacttgtttgatctgtggaactttaaatgctggtggattccttgatttggaaaatgaagtgaatcctgaggtgtggatgaatactagtgaaatcatcatctacaatggctaccccagtgaagagtatgaagtcaccactgaagatgggtatatactccttgtcaacagaattccttatgggcgaacacatgctaggagcacaggtccccggccagttgtgtatatgcagcatgccctgtttgcagacaatgcctactggcttgagaattatgctaatggaagccttggattccttctagcagatgcaggttatgatgtatggatgggaaacagtcggggaaacacttggtcaagaagacacaaaacactctcagagacagatgagaaattctgggcctttagttttgatgaaatggccaaatatgatctcccaggagtaatagacttcattgtaaataaaactggtcaggagaaattgkatttcattggacattcacttggcactacaatagggtttgtagccttttcaccatgcctgaactggcacaaagaatcaaaatgaattttgccttgggtcctacgatc

SEQ ID NO: 114 - DNA, 739 bp, Homo sapiens
  SITE (19): n equals a,t,g, or c
cctattgggaaagctggtncgcctgcaggtaccggtccggaattcccgggtcgacccacgcgtccgcaaaatacctgagcccaggtaatttataaagcaatgaggtttatttggcttatgtttctgcaggctgtacaagcttctggtaagggcctcaggaagcttccacacacggtggaagatgaaggggagccagaatgtgcagattacatggtgagagagtggaagcaagagagaggggcaggaggggccaggatcttttcaacaatcagctcatggatgagcacagtggctcatgcctgtaatcccagcactttgggagcacaagatgggaggatcacttcagcccaagaatttaattaagaccaaccagcctgggcaaaaaagtgagactccatctctacaaaaaatcaaaaaattaaccagtcacggtggtgtgtgcctgtggtccaaactacatgggagactgaggtgggaggattgcttgagcccaggaggtcaagactgcagtgagttatgctcatgccactgcactccagcctcggcaacagaatgagacactgtcttaaaaaaaagamaagtgaatttataaacaaaattttaaaaaatcagctcttgtaaaaactaagagtgagaactgactcattattgcaaagataacactaacctattcataagggatctgtcccattatccaaacacctcccaccaggccccacctttaacaatgggaatcaaa

SEQ ID NO: 115 - DNA, 529 bp, Homo sapiens
aatttcaaaaacaacgaaaccttcttttgccccctccgcagcagtcgcctccgggctttattgcaagtttacggttccatacaagtaaatccgaaaaaaagtgtgtgtgggggggtccacaccactaattattatggcgaggaagataaagaagacatggacagaaggcggatggctctgcggcctggctcccgcagaccgaccgccttcttcttccattcgagatggctcgtaccgaacctccttgccttcttcctgggtctctcgggggctggaccaatacatctgccgatgccctggccgaatggcaggcgacatcgggtcctggacccccacacgcagctcagtacccacgaggccccaggccgctggaagcctgtagctccgcggaggatgaaagcctgcccgcaggttctcctggagtggtgagcctctgtcggaagggggcgcccacgtctttttaatggtcctaacacaccagtggaataaatctctaagattccaaaaaaaaaaaaaaaaaaaaaaaaaa

SEQ ID NO: 116 - DNA, 751 bp, Homo sapiens
  SITE (657): n equals a,t,g, or c
  SITE (658): n equals a,t,g, or c
  SITE (691): n equals a,t,g, or c
  SITE (717): n equals a,t,g, or c
  SITE (726): n equals a,t,g, or c
tggatcccccgggctgcaggaattcggcacgagtttcagggcaattttatttcctctgagagcttgtggtcacctctatgccagtgattaccaaactaaatctctagtcttggcttttctcttaaatctataaatctattccacatttctatcctcgtgatagacttttttgggatggagtttctccaactcaaacctattttaccacctttccttcaaagcttgctcctcttactaatttctcagtgtctgctgttggtgccactattttctcagagataaactttggagttctactaggtgcctcatttctctcacctgtcacatcctgtcagtggccaatgatgtccattcactgtgtacagcctctcctcccattatttttgccatcgtcttatttcaagcaattcttattacttccctggacttttggagtagccctctaattggtttacagtctccaattgtttttcctaatacatcttataaaatactgatgacttttcctaaaaccaatcatgcgaaacctcagcctaaaattcttcatggagtttgattatctactgaagaaaatgcaaacttagcgtgacattccagattttcctggtccccgcctacctttctaattttatctaatctctacctttaattcttggnntatacctttctgataacagtcactggtttcagntagaaagctgaaaaggacactaacantttggtagnaaatgctaaatgccttatatatggc

SEQ ID NO: 117 - DNA, 660 bp, Homo sapiens
  SITE (17): n equals a,t,g, or c
  SITE (67): n equals a,t,g, or c
  SITE (71): n equals a,t,g, or c
  SITE (159): n equals a,t,g, or c
  SITE (209): n equals a,t,g, or c
ctggagcctgaaagacncttaccattttgttaggaaatgctaaatgcctaatatatgtcacttaatngcangcataggtaagataggtttaattcccattttaaaggtgaagtaactgaggtttcagagagttcaggttaatttgtccaagatcatacnacttgcaagtagagcaatcaaggttggttgattataatatccacatgctntctgtcacgttgtgttaattctttgtgtacatgtcattttcccattgcttaactttggttaatcttaaaagaaggattgctgaatcaaagtatatatccatttaaaatgtgacacacattttcaaactgccttctagaaaggttataccaggctaggtgcagttgtctcatgcctgtaatcctagcactttgggaggctgaggwrrrcggacagcttgagctcaggagttcaagaccagcctgggcaacatggtgaaaccctgtctctgtaaaaaatacaaaattggccggtcgtggtggtgcatgcctatagtcccagagattgaggtgggaggatcgcttgagcctgggagatgaaggttgcagtgaagctgagattgcaccactgcaccacagcctggtgacagagtgaggccctgtctcaaaaaaaaaaaaaaaaaaaaaaactcga

SEQ ID NO: 118 - DNA, 1488 bp, Homo sapiens
gagctgccccgtccaggttcatgttcctcttatttctcctcacgtgtgagctggctgcagaagttgctgcagaagttgagaaatcctcagatggtcctggtgctgcccaggaacccacgtggctcacagatgtcccagctgccatggaattcattgctgccactgaggtggctgtcataggcttcttccaggatttagaaataccagcagtgcccatactccatagcatggtgcaaaaattcccaggcgtgtcatttgggatcagcactgattctgaggttctgacacactacaacatcactgggaacaccatctgcctctttcgcctggtagacaatgaacaactgaatttagaggacgaagacattgaaagcattgatgccaccaaattgagccgtttcattgagatcaacagcctccacatggtgacagagtacaaccctgtggcctccccagagtatgaagagaacatgcacagataccagaaggcagccaagctcttccaggggaagattctctttattctggtggacagtggtatgaaagaaaatgggaaggtgatatcatttttcaaactaaaggagtctcaactgccagctttggcaatttaccagactctagatgacgagtgggatacactgcccacagcagaagtttccgtagagcatgtgcaaaacttttgtgatggattcctaagtggaaaattgttgaaagaaaatcgtgaatcagaaggaaagactccaaaggtggaactctgacttctccttggaactacatatggccaagtatctactttatgcaaagtaaaaaggcacaactcaaatctcagagacactaaacaacaggatcactaggcctgccaaccacacacacacgcacgtgcacacacgcacgcacgcgtgcacacacacacgcgcacacacacacacacacacacagagcttcatttcctgtcttaaaatctcgttttctcttcttccttcttttaaatttcatatcctcactccctatccaatttccttcttatcgtgcattcatactctgtaagcccatctgtaacacacctagatcaaggctttaagagactcactgtgatgcctctatgaaagagaggcattcctagagaaagattgttccaatttgtcatttaatatcaagtttgtatactgcacatgacttacacacaacatagttcctgctcttttaaggttacctaagggttgaaactctaccttctttcataagcacatgtccgtctctgactcaggatcaaaaaccaaaggatggttttaaacacctttgtgaaattgtctttttgccagaagttaaaggctgtctccaagtccctgaactcagcagaaatagaccatgtgaaaactccatgcttggttagcatctccaactccctatgtaaatcaacaacctgcataataaataaaaggcaatcatgttaggaaaaaaaaaaaaaaaaggggggccgttttaaag

SEQ ID NO: 119 - DNA, 656 bp, Homo sapiens
gatggggctgacgtcaactaccagagcaaagaagggaaaagtcctctgcacatggctgcaatccatggccgtttcacacgctcccagatcctcatccagaatggcagcgagattgattgtgccgacaaatttgggaacacgccactgcatgtggctgctcgatatggacacgagctgctcatcagcaccctcatgaccaatggcgcagataccgcccggcgtggcatccatgacatgttccccctgcacttagctgttctctttggattctctgactgttgtcgtaagcttctttcctcaggtcagttgtacagcattgtgtcttcactcagcaatgagcatgtgctttcagctgggtttgacatcaatacacctgacaaccttggccgtacctgtcttcatgctgctgcttccggagggaatgttgaatgtcttaatttgctgttgagcagtggagctgacttgaggaggagggacaaatttggcaggaccccactgcactatgcagctgctaacggtagctaccagtgtgcagtaacattggtgactgctggggcaggtgtcaacgaggccgactgtaaaggctgctctcccctccactacgctgccgcttctgacacttacaggagagcggaaccccatacaccttccagcca

SEQ ID NO: 120 - DNA, 1394 bp, Homo sapiens
gttacttaaaggtaacatcacatactaaatgtcttctataatcctatatttattaatgcattacaactctgtagattgttagttactaggccagtagctaggaattggtataaatttaatgcaccttctatcctgaataactagcatggaaaagtgaatatatgtgtgagcagatatggctataaagacctatagcttttgcactttatgcatatataatcaatcctttctagttcagtgaattgaccccatccacaggctgattcatctttgtgttaaggggcaaatgaaacggtatattatttctttgcagtctcctctcagtcattcatcaatgtggccagcttatctactcccaattatgttgttgatacatctccaagccatctgtcatcagatcaaaaagcagcaaacagagggtcagtcacaggatgttctgacacaccattgtaactttttgttagagatgatcccatttagaaaaagactggtagaaattggagtgaaaggaaccctacagattagcccagttctctcttattttcagctttacagacaagaacaatttaaatctaaagaatttagtagattccttcagtgtcacaaagctgtttcatgaaagaatcaagattataacctggatattctgactcctggcccagtgctttttcttactttgtagctacactttgaagtaagattcaaactgttatccactcaattgccttattcctgaggatgtagtgaaggaagaaaaagttttctggaattccgtaaactatattttaagcttatttcttcaaaattattttcatatatcacagatatatcattggaagatataatttgcatatatgttcattatcagtgttcctaatttggtattacatgtattctatttttttctgaatgatagcatgaaaagtgtcaaagtggtttgtccgctagcgtctgtctgcagaactttcaggatgactattaattcctctcagatgtcatttttgagtggtccaagcctgctgttttgaacccacagcagtggagatttgtattcttatttacagttgtgtactataaagtgtgtgttacataggttttgtgtaataattatttgtaaatattatttagatttgtatttagacatgatttatatctaatatagatacaaagtctgtgtctaaatattatttaaagaagtgatttttcattctcttggattctttccagtgtggtgccttttatatgcctcacatagtctccttgttctcctactaatattcccaagctccatatgccaattaaagaagaaacaaaaataaaagtttgtcttgcttgtgaaacattaaaaaaaggctgtcaggtttaataarctttttaatgaawattcrgacatg

SEQ ID NO: 121 - DNA, 1164 bp, Homo sapiens
tgttggtatctcaaataaagtctgaagatcacggctcagcccagattgttcccctggccaactccacaggtttgaacctggcattctggacaccagctatgcctcctccatttctcagaaaacctttgatcttgtgtgtctttcttcctactgaagggaattgtgggggcagttctttggccttcttgctgaactttgctggaaatagcccacaatttttatcagaggttagaactgtacattatcagagagactggacactttatcccctagcaaagtgggagaagattttaccagctcattccactccaccctggccttcccccaccccccatccccagcagcatttccatggaaatccagatggtcgtgtagtgttatggctctcttgtgatagactggccttcatattggagagctagggagagcccctgggagggagagagataaggcgctatctgccttcaatcagaaccttcggtttaaaatcatctaagagtctatacttgtgtgtacatacgtatttatttttatttatttttatacaattccattggcatggtccttcaccgaccctatgatttgcactttttatttctatgtgtgccacacacaatgcagtattaatggcaaccaggtaaatattgatttattttttaaagcttttcttcagtgttttgtcaaccatttcaaagtgtctcccaaaaaaggatgctgaagagcaattgctcccttaagcaacagattcatatttaccctgggttaatacaacaaaaggcctgtataattgtcttttcattgttaacacccaaaatagcatctatctagacagtatccccaaagaatttggaaaatctgatggtgtgagcagcagccgttagtatcagggtttcccattcttggacagtccgaggctgtgacctgttagataattagattatacttgaactggaccagagtttgttttttgaatttatgagaaaaaccaaaacactaagttaagtttgaacttgtaaagtattgaaatttgttgagtgtcctataaattgtcactacttttcctgatctgtataactgactgcaaagtgtttgtttttacaaaagagaaaagaaaagatttttaataaagagaatttgaaagctgaaaaaaaaaaaaaaaaaaaa

SEQ ID NO: 122 - DNA, 2793 bp, Homo sapiens
tgagaagactggagctccgaggagctgcatctgcggcaacctgtgtgctgacgctacgtgcctcctggctccgacgtagctcgcagctccccagtctcactccattccttccccacctggcgcgcacctgctcaagaccagggtcctgccaagcgctaggagggcgcgtgccaggggcgctagggaactgcggagcgcgcgcgccatggggccgccgcctggggccggggtctcctgccgcggtggctgcggcttttccagattgctggcatggtgcttcctgctggccctgagtccgcaggcacccggttcccggggggctgaagcagtgtggaccgcgtacctcaacgtgtcctggcgggttccgcacacgggagtgaaccgtacggtgtgggagctgagcgaggagggcgtgtacggccaggactcgccgctggagcctgtggctggggtcctggtaccgcccgacgggcccggggcgcttaacgcctgtaacccgcacacgaatttcacggtgcccacggtttggggaagcaccgtgcaagtctcttggttggccctcatccaacgcggcgggggctgcaccttcgcagacaagatccatctggcttatgagagaggggcgtctggagccgtcatctttaacttccccgggacccgcaatgaggtcatccccatgtctcacccgggtgcagtagacattgttgcaatcatgatcggcaatctgaaaggcacaaaaattctgcaatctattcaaagaggcatacaagtgacaatggtcatagaagtagggaaaaaacatggcccttgggtgaatcactattcaattttttttcgtttctgtgtccttttttattattacggcggcaactgtgggctattttatcttttattctgctcgaaggctacggaatgcaagagctcaaagcaggaagcagaggcaattaaaggcagatgctaaaaaagctattggaaggcttcaactacgcacactgaaacaaggagacaaggaaattggccctgatggagatagttgtgctgtgtgcattgaattgtataaaccaaatgatttggtacgcatcttaacgtgcaaccatattttccataagacatgtgttgacccatggctgttagaacacaggacttgccccatgtgcaaatgtgacatactcaaagctttgggaattgaggtggatgttgaagatggatcagtgtctttacaagtccctgtatccaatgaaatatctaatagtgcctcctcccatgaagaggataatcgcagcgagaccgcatcatctggatatgcttcagtacagggaacagatgaaccgcctctggaggaacacgtgcagtcaacaaatgaaagtctacagctggtaaaccatgaagcaaattctgtggcagtggatgttattcctcatgttgacaacccaacctttgaagaagacgaaactcctaatcaagagactgctgttcgagaaattaaatcttaaaatctgtgtaaatagaaaacttgaaccattagtaataacagaactgccaatcagggcctagtttctattaataaattggataaatttaataaaataagagtgatactgaaagtgctcagatgactaatattaygctatagttaaatggcttaaaaatttaacctgttaacttttttccacaaactcattataatatttttcataggcaagtttcctctcagtagtgataacaacatttttagacattcaaaactgtcttcaagaagtcacgtttttcatttataacaattttcttataaaaacatgttgcttttaaaatgtggagtagctgtaatcactttattttatgatagtatcttaatgaaaaatactacttctttagcttgggctacatgtgtcagggtttttctccaggtgcttatattgatctggaattgtaatgtaaaaagcaatgcaaacttaggcgagtacttcttgaaatgtctatttaagctgctttaagttaatagaaaagattaaagcaaaatattcatttttactttttcttatttttaaaattaggctgaatgtacttcatgtgatttgtcaaccatagtttatcagagattatggacttaattgattggtatattagtgacatcaacttgacacaagattagacaaaaaattccttacaaaaatactgtgtaactatttctcaaacttgtgggatttttcaaaagctcagtatatgaatcatcatactgtttgaaattgctaatgacagagtaagtaacactaatattggtcattgatcttcgttcatgaattagtctacagaaaaaaaatgttctgtaaaattagtctgttgaaaatgttttccaaacaatgttactttgaaaattgagtttatgtttgacctaaatgggctaaaattacattagataaactaaaattctgtccgtgtaactataaattttgtgaatgcattttcctggtgtttgaaaaagaagggggggagaattccaggtgccttaatataaagtttgaagcttcatccaccaaagttaaatagagctatttaaaaatgcactttatttgtactctgtgtggcttttgttttagaattttgttcaaattatagcagaatttaggcaaaaataaaacagacatgtatttttgtttgctgaatggatgaaaccattgcattcttgtacactgatttgaaatgctgtaaatatgtcccaatttgtattgattctctttaaatataaaatgtaaataaaatattccaataaaaaaaaaaaaaaagggcggccgc

SEQ ID NO: 123 - DNA, 511 bp, Homo sapiens
tggaattcccaaggtgctggaggttgaaaggcattgagaatctaaaacgctttgcagacagcaagaccctctgtgtaagttaagaatgctcactcagtcccagcaggtactcagagggatccttttatttctccagaacattctgcaggtgagctggggaagcccactggccctggcctcacccccgagcccgagccttcagcctgggaatggtctggcctcttccttgctggctctccagcctggcctcgcaggaccctgggcgggaccccaggaaccctcacccgctatgtgcttccccaagaagcgctccctgyggcctaatttgagaaaacaatgggcctcaatccatattaatgaccctagagggaccctttgtcctcggtgcacaggctgtaatcagcggkrctccgggrgctctggcctaatttggagggacaggttttatcatcacccttgattcgggtgacccaatctgacaggcccacgaccccctgtatgcggggtccac

SEQ ID NO: 124 - DNA, 581 bp, Homo sapiens
  SITE (496): n equals a,t,g, or c
  SITE (580): n equals a,t,g, or c
ccggacgcgtggggtctactaaaaatagaaaaattagccaggcgtggtggcaggcccctgtaatgccagctactcaggaggctgaggcaggagaattgtttgtatccgggaggcggagtttgcagtgagccgagatcgtgccactgcactccagcctaggcaacaaaccaagactccatctcaaaaaataaaaataaaaaaagcaggtgatgggatgacatggagtttttgttttgctttgttttgttttgttttgttttttgctgcttccctgataggctatatactgctcccttcagcctctccccgaaaccacaggcgcccaaacaatgaggccagggttggaacccctggccagctagatgatgagctgaaggggaggcaacctttagccagcagacttgagacatctcagtgtactcagggtctgctggctagcaggcccagtggggtctccaaagcccttctgtatccttaatggtccttaaaccctggntgaagatccccccagttgtgtttacttaagccagaaggctgggcaatctctatatcctttctccatcgatcatcctatgattgnt

SEQ ID NO: 125 - DNA, 1166 bp, Homo sapiens
  SITE (1163): n equals a,t,g, or c
aatcaccagttccgtgtccactatccgacagtatccagtttcagctcaggctccaaactctgccatcacagctcagactggtgttggggtagcgtctaccgtccacctaaaccccatgcagttgatgacagtggatgcatcgcatgctcgacatattcaagggatccagccagcacccatcagtacccagggtatccagccggcccccattgggaccccagggatacagcctgcaccacttggcacacagggaattcamtcagcaaccccaatcaacacacaagggcttcagctgcacctatgggtactcagcagctcagcctgaaggaaagacttcagcagtggtgttggcagatggagccacaattgtggccaaccctattagcaatccattcagtgctgctccagcagaacaactgtggtgcagacccacagccagagtgctagcaccaacgctcccgcccagggstcatcgccamggscaagcatamtccggaagaaacctgccacagatggaatggcagttcggaaaaccctcattcctcctcagcctcctgatgttgctagtcctcgagtggaaagctctatgcggagtacgtctgggtcacctaggcctgcaggtgccaaacccaagtctgaaatccacgtgtctatggccactccggtcactgtgtccatggagactgtatccaatcaaaataatgatcagcctaccattgccgtccctccaactgcccagcagcccccaccgaccattccaactatgattgcagcagccagtcccccgtcacaaccagccgttgccctttcaaccattcctggagcggtccccatcactccacccatcaccaccattgcagctgcaccacctccatcagtcactgtgggtggcagtctttcctccgtcttgggccctcccgttcctgaaattaaagtgaaagaagaagtagaaccaatggatatcatgaggccagtttctgcagttcctccactggctaccaacactgtgtctccatctcttgcattgctggcaaacaacttgtccatgcctacaagtgacctaccacctggtgcctccccaaggaaaaagcctcgaaagcaacagcatgtgatctcaacagaagaaggtgacatgatggagacaaacagcactgattaatganaaa

SEQ ID NO: 126 - DNA, 692 bp, Homo sapiens
  SITE (1): n equals a,t,g, or c
  SITE (8): n equals a,t,g, or c
  SITE (12): n equals a,t,g, or c
  SITE (32): n equals a,t,g, or c
ntttgccnggtncctgttttaatcacttgatnataaacttctggaaaaagatcattattttcactctgaaatttccatacagcaagtattcaataagtgtttggcagatggatgaatgggcagatattataggttcttaccatgttgattatgaagaagtacaaagtattcagaataaaaacactaagcacagtaataaaccaagggtgtgccagtaaatttacccagtaaattataactttcaaaaactgacggttcttaaataaactttaatctctgcactatttccgggaatwtcacacatggttattacagttgattatttcagggaggcagttcctctgctaataatagttgtgaactggctggacagaggcctggaagacaccagactttctcttctgaattaactccacagtgttttgttgttgctcttggcctgaccrawrttactcttmtagcctagagtagtggttctcagctctgactgagcatccaaatcccccatggagatttttcaaggcataattatctaaatcccactgcccagattatgattctgtcggctgagtaggggtctatgtgctcacatgttctaaaaactctagagacatttctgatgcatagccaggttcaagaataactatttcaaaagtcacccacaggttaaaaaaaaaaaaaaaaaaactcga

SEQ ID NO: 127 - DNA, 675 bp, Homo sapiens
atttctgacctcgtggggcgtgtggtctccggatggctgggagatgcagtcccagggcctgtgacacgactcctgatgctctggaccaccttgactggggtgtcactagccctgttccctgtagctcaggctcccacagccctggtggctctggctgtggcctacggcttcacatcaggggctctggccccactggccttctccgttctgcctgaactaatagggactagaaggatttactgtggcctgggactgttgcagatgatagagagcatcggggggctgctggggcctcctctctcaggctacctccgggatgtgacaggcaactacacggcttcttttgtggtggctggggccttccttctttcagggagtggcattctcctcaccctgccccacttcttctgcttctcaactactacctccgggccccaggaccttgtaacagaagcactagatactaaagttcccctacccaaggaggggctggaagaggactgaactccacagagtcaggcccagaaagccaaagcttgacagctccaggtcttctcttgccacgtcttggtctccacagaaccacagtgccttaagattcttgatctgcctccccctagagcaggcctggggctcctgcaatgtgtgtgccaaccctttgtattttgttgagga

SEQ ID NO: 128 - DNA, 3669 bp, Homo sapiens
  SITE (199): n equals a,t,g, or c
  SITE (2797): n equals a,t,g, or c
tcaaaaatagtgatagctttgataatcagctcctagacctagactatccgtctaagagggaagctacagggcaaggctaggtcaccctgatctcctagcagcttatcaaaagaattatatgggcaagttggcaaggtccctgctgtgaacgaaatcatctgtccatctcaagatgaagatattccaacatgcacctatnaagaaaaccactgctaagatttgagttctgtgaacctgcatttgttgttggtaattgcctccagatagcttctgacagtcatcagtatgatcgaatttattgtggagctggagtacagaaagaccatgaaaactacatgaaaatattactaaaagttggaggcatattagtcatgcctatagaggatcagttaacacagattatgcgaactggacagaacacttgggaaagtaaaaatatccttgctgtttcatttgctccacttgtgcaaccaagtaagaatgataatggcaaaccagattctgtgggactccctccctgtgctgtcaggaatctacaggacttggctcgtatttacattcgacgcacacttagaaatttcataaatgatgagatgcaggccaaggggattcctcaaagggctccacccaaaaggaaaagaaagagagttaaacagagaattaacacttacgtatttgtgggtaatcagcttattcctcagcctctagacagtgaagaggatgaaaaaatggaagaggatawcaaagaagaggaggaaaaagatcacaatgaagcaatgaagccagaggagccacctcaaaatttactgagagaaaaaatcatgaagctgcccctccctgaatctttaaaagcttacttgacatattttagagacaaataacttagatcaagaagaaaaatgcctactgataattcctttagtcttgaaaatgtagcatttgttaggagttaaaagagagaattatttctttcatcagagcaaattatagtggaaaaaaaaatcacttgtttctgtcagtaacacaaatgatgtattcagtgaataaaagaatcccttttataaaatctatttttctttaaatcttggaaaaatgttgttttagctcagagtgatttcaaagtggaatgcaacagtagtcaagacttgtgtactataaatccttttctgattccttacagatttgtagtgatgaggtttagatttaattttatatatggtttaaataattgttaagcttatataacctgatctgaattgcagttgtttgcatttcctctatgaaaacttcatttatctaataaggaagtcaaatgctttgtagactatttaccttacttttgttgcaatcactgttgttgggttgctgtatatatattccgggcaatatatgagtgcaataacaatacaagatattgaataatttagctttaaaaaatcccacaaattttatgaaattttacagccctgctacttttgcttttgaatctcttgccaaaagacatgggtaaaatatctgcctctctcatagagattttaagagcacagcaagtgaattattaaaacaaagtctatacttaatacaactctttatatggaccctttacattttcagtatttaaaaaaaataactctatagaattttaaaagtatatttagaattgttttttctgtagttcactgtataaagtatttggttttttaaaaaaagcaaaaccattgttatgtgtgactcttgataggacacagaacgagtgaatgagcatgagtgaggccactttcttggatggctgtaagtagcagggccagggtagacctggtcagcggatgcactttagcagatggaacttctagtttatctgaatatttatctttgacaaggtagggctgagcctacatttgcttttgatctatctagtataagaaatattcacagaaattgtatgtagataccctttgttttgaaaatgctgttcagaatcatagtgtaatctttgggacctatgccatgttcatttcactccttcccatattttttgtgtttcttttggtaaaactataatggttttcattttttacttaatatcacacagttaaactgtccatatttgagctttattttagcttatcagtgataaaaaacaggtagtaactgccattgtttgtttgttttcctaataaggcctgaaaacagccattccttgttaagaaagtgtacaatgtaacatatttgctagagttacatggattatatatttcttaaagggaaaaatttgagagtatcatggactaccaccagcattattattacagtagttactcagatttggttaaggaagcccaagcaatgtatagtgaaaggattattatctctctgctaagattcagatattgtttcagaaatctcagctccagtaattccacaacatctaaaaacaaatgtttgtgatcatgtgtaagcatgaaattgttccaagtaagtgaggatattttagttatgtgaaagacagtttcatggaaggtatttgttttataccagtggctgggatggtggaattggggttatttctacaattattcttagacgattactaaactgttaagaaatgccccatatcatttttgtatctaggaaagaaaaaaatcagtttcatactgttgtcatctgtcagaaatgctcattttattttgaattaaatgtggcttttgaagtacctagttaccttgaattcctggtgaccacatgtttttatctggaaaacctggagaaagttatctgtcccatctcccctgcttgnttttttttttttttttttttggttggagctgctgtttagatgatgcttttactatgcaggagagagtttttgttaaggatatatttgaagattggcttttccatattgtccttcattctttgaccgtggcaaagtgtacagtagattttcatgatcattgcatatttcttgtcattgaaatgtatcttttatgtttttaaatgcattcattttacacttgtgagtttatcattgactttaagaggtagaaatgaaaaatgaaaattaaagctaaagcctttttatctattaatgcagatatattagaataagaatattttgggtttgtgtttattttttaatgaatttatgtttacttgatatggaaaattacgctttataggtggaaaagtagcaaataaagattaagtaaaagtaagtgaaaatgatggggaatatagtattggaattttatagctagttaaaacaataagtatcatctaatttgggtgtttattttgcagatgagaaaacagacctagaaccgtggcatgttttgcctgaaacatrcagtgagttagagacagggcctaagatagcttctagcatcagatcaatcccaagaatccatcagcaacctcagaccaacccaagaagataatttaaatctatactgcttattggtcaatatatttggttctagtattaataaagaaaaatgttattaaaatagcatacatagtagtaaaataaaatacaaaaagtgtgttgatttatagctgtttgagatgataaaagtgaagcaaagcctgttaaatcattggaagacttggaaaattattttaaataaacaattacatgtaattaaaaaaaaaaaaaaaaaaaatactgcg

SEQ ID NO: 129 - DNA, 667 bp, Homo sapiens
  SITE (571): n equals a,t,g, or c
gatcctcttaccttggcctcccagaatgctgggattacaggtaatgagccactgcacccggcttgtagcattttttaaaaagttccttcatacaggcccaccactcccagcctcctttatccttttgaccacaagattctctaggcacatcttatatatttccggccccagtcctagaatcagccacttctccaaggagccctgattctttttattagagaatggtattagaaaccaagttctaggcattgggtgtgcttgctactgggatgttgtggcttgtaggacctttcagctgactgagcaagggatgtacatgtatgtatactaaactaagtttttctgtatgcagtcatctgtatctatattaagctaaacatgagttgatgtttccaattctatccattaccactctatccattctagccttcttcctttggttatctgtcacctctcacttctacagacagaaaactggctttcatcattcaccatctttttacttaattgttcaaatctgggatacatatgcagatatagtggcttcagaatacgtattcccatggagaanaaccttatcaagtagagaacagtgcttaagtgtagttcctgttgcctttagtcttatagacttcatttccaaagtttcttagcaccccccttcccc

SEQ ID NO: 130 - DNA, 561 bp, Homo sapiens
ggggcttgtaaatgtgtgtgagtttctgagtgtaggtgccgaataaatgtttattgatgatgcctacctatgcaatctgcatggtgcttgtatttctattgcttgtgcatttgcacatcataaacacaaacacacacacacacacacacacacacacacacacaggcttgcttccagagccatacatgctctattttcagtttctgagtgtcctaagaggttatatcctgtctagatggacggaccgagagtacacttggatttctaccaagatatattctcctaattcaccagaaccccccgcttcctgcccatcccctacacagagcatctcacgccatgcagtgcagggaagcacattcctcaaagctcagctgcccacctctgagcaggtgcaaatccacccactgcatcctcccatccacctttctcccctctgacttctgctctcctcctaaatggtctcttttccccctgcctcctcctccttcgtttcccttctccagagaggcagaggttaggtgtgcttgaccagsattcaccaagtgcagacatcaaaac

SEQ ID NO: 131 - DNA, 702 bp, Homo sapiens
  SITE (693): n equals a,t,g, or c
ggcggagcttgcagtgagcctagatagagccactgcactccagcctgggccacagagggagactctgtctcaaaaaaaaagaaaaaaaaaagaaaaagagaaatctatgacatcacttgccaggctcccatgttcttacctctgcctgccttgccagctctcctcctgctgtgccttctctcagcccatctctgcacttcttcccagtccttcaacacctgtgcttctctctgcccccaggccttccagccagggggtcccaggcaccagaagtgaattcccctcaacccccttctgtctgccctccttcccacgtgaatccttccttgattcctttcatctggtcagctcccattagtatgctctctttgcagcctgccctttctcttttcagtgcgtgatcacaactgtattaggcaatcacctgtctaatgtctgccttcttaattagaacttcaaattcacgtgggcataacatcggtctgccttattccttgtggtatcctggatgtcgaacataacacytggcacctggtgggcaatgattaaatatttgtggaaagaatgggcaaaataaaagagtaaaaaaaaatgagtgcaagatacagtgaagtgatgtggcaatattgctaacttttaaaaawttgtcaaagagatactgagttcgaggaagaggaagatagaaattatgcntggaatgct

SEQ ID NO: 132 - DNA, 483 bp, Homo sapiens
  SITE (416): n equals a,t,g, or c
  SITE (422): n equals a,t,g, or c
gctcgtgccgcttttttcctgccatcggtcagaaaaaacatgtcgaagatggatggcattagattatgcaggaatttctattggaatactgggctgctatgtctcaggagtattttacgcattttattgtaataactactggcgtcaggtgtacttgatcacagtgcttgctatgatcctggcagtgttctttgcgcagattcatcccaattacctcacgcagcaatggcaaaggctccgttctatcatcttttgttctgtttcgggatatggagtgattcctactcttcactgggtttggctcaatggaggaattggtgctcctattgtacaggactttgcaccccgtgtaattgtgatgtatatgattgctcttcttgctttcctattctacatttccaaagtcccagagcggnactttncagaatcacttccacggtgaatcatasaagggattgtaccactcgtcacgtgggtgggaaa

SEQ ID NO: 133 - DNA, 748 bp, Homo sapiens
  SITE (6): n equals a,t,g, or c
  SITE (15): n equals a,t,g, or c
  SITE (37): n equals a,t,g, or c
  SITE (62): n equals a,t,g, or c
  SITE (65): n equals a,t,g, or c
attttnggggaaccnagattcttagggacaatgcccnacctggaatttggaagcccaccccnatncttccaggcaggcccagaattaccggaaaacaattctggacaactaactacctcggattcaagcccaccaaatatggcatatccttgcagtagtgatgttatattggtggcatcagtcaacagtgtatgtcatgcagtacagacatagcaagccttgtcctgactatgtttcacatttgtgaattagaatcaggaacgaagattcagggaatgtctgtcacatcttatggcatcccacctggacagaatatccgatttgaagattgtgattgacttccgtaaaactgtacaactctccatttggcagctgctacataataggtgcttaatgtttgtggtgtgaatgaaataactgaatttgaatagaagtttacatccaaaagtcataataagacaaataatgaaaaactccaaagtcactgattataaagaatatgcaatccatttgggatttattgcatttaaagaaaacagattaaaacagtgcttacgtgaagtaccaaaacctaaaataaaccaagcagagtagctgacttgtaagaaaactgctctgcctggtgaacttcagcatagaagagtgggctccaccttagattttccaccagcaagaggacaacagtctatcactcttaaacaataaacagggtaagactgaaaaaaaaaaaaaaaaaaaaaaaactcga

SEQ ID NO: 134 - DNA, 652 bp, Homo sapiens
gcccgcacctggggctctccgctcgttagcgcgcccagggcgcctcctcggcccgagagggacccgcccgcggggcctggctggctcagggctacctccttccgcctaggacccccccttcggtgactcccgattccctgtcctaggctgcggtgccccgggaggcgggtcgccagagtagcagacagagctctttaatgggtgtcttctagggcgggtgctgtttgtgcatcatttgggttcccacacacttcctatgaggtggcgaaagccattatgcctatggtgtctgctcacacagggggaaactgaggcccaggcaggacagccccttgcctggggtgggggctgggttgtccttaggcctgtgacttsacctmtacagcaccctcctgtggaccctctccctgccmccgccaggccagagtcctgcagccaggcccagaccytggcctgtccgtccggggatgctggacagtactcctccctccagccctcataagtcatkgtcattcggatstgcatttccccagcccctctccttctaastggggggcactgtggcccactgtgcccctttctcttcccattccttccccctacacccattccagacatcccagagttaacaaaacccaaaaaaaaaaaaaaa

SEQ ID NO: 135 - DNA, 3006 bp, Homo sapiens
  SITE (2700): n equals a,t,g, or c
  SITE (2711): n equals a,t,g, or c
  SITE (2808): n equals a,t,g, or c
tttttttttttttttttttttttttwttkttcaagcagaaaacaagctgcttttattacagtatgatgtcatgactcatttgtaacagatccagcctcagggacagccctgtaaggcagcaagtggggctggctccaaatgggtatgagtctcagaatctttggtaaggcagaactgaactgggctgagaggtggtcttaaggcctgggcaggctctattctctctggactggctgcagcctgcagtctaggagaggcccagtacagcctggagctcctgagccttgtcaacaggcagtgagcccagagctgcttgaaagctgtcggtgtgctgtttggccaggaacgtcaggagcagcaacagtgcggccttggtgtctggtgggatcttgttgtcagccagaatgaggctgcagatacgcagaagctcgggagccacatctataacctggtcagggctgctctggtacaggaagctgaagaggcgcccaatggtgacccactcctccaagtcctccttcagtggcagggcatgcagtagggcagccagcacctggggctctggtttcctggtgggactggccatcaacaggcgggcaagtgccccacagatgttgtcacggacacgatcatgtcgctcccgcgccaggaggggaaaaaggagccccagcagcttggggaagtgttcctgggcagggtggcccccatgctctgccagcacgcccatcccgaagatggcattgcttcgcacctcggggtctgcctcttgggcggtgctcaacagcacagggagcagccgagacacaaactgggctgaggcagcacccaggccctgaatagtctctgccaaggtccccactgcaaaggacttctctgccactgtgcagccctgttttgtcttgcacaccaataatggcaggaaaccggcaaagaatggggcaaaggagtctcccccagccgcggctgccagggcagggatggcctctccagcgtgctccagcaacatggcgtcgtattcagcctgatcatcatcttcctcttcctcctcctcgtcagtatcctgacaggctgtcttcctctgcagcacagccttgagcacgccacagagctcagcgaggcgcccagggggcttcagtgtgagggtcccacagctgcggagcacccctgtcagggcctccagcacggccatcaccacctggcgttcccgctccctgttcactgcctgcatgtaggatggcacgactcgggccagggcagcctgcaaagcagcagtgttgggttccgaggggcagctttgacaggccttgtgcagtgcacagcaaaactgacccagagcctcatgggctgccttccgcacattcaggtgagggcactccagcagtttaaatacttcttcaaagacactttccatgtatggaaggaaggccacactggtgttcacagagatctcccccacggcagcacaggtgtcttccttctcatcgaagaaggcattctccacgctgtaccctgagatctytgagtcatcctcttcttccacatcctcatccatgagctcctcctcttcttccccatcactctcatcgtcaaacagaaggaaggagctgctcccgtcatactgaggcacaatgccctcggtggaacgcagtgacagcagcatgagcgtggtgatctgttccaagtggggcgccaggccctcacccatcagacccgataaggctgcaaataggctgtacgtgcagcgccgcaagtcagcgtcgtctacctggtcgcagaggcccagacccagctggcagcattcctcagccagcggcctcatgggctcccccactgctcgtgccagcacccccagtgtctccaggctctggatctgcacaggctgaaggtcctcacggcctgttaacaggaattcccgcaggtgctccatgatggcagggaagtagggcagcagcgagrcctgggcagccgtagcaatggctcccagggcgctcacagccagctccttggcccggggactgctggggttcctcagaagctgcagcatgcattccataagctccggaaggtagggctgcaccttgggccctaggttctccacaaaattctccagggcatagcaggccttggctaggtggtgtgtgtgtccaagaggcaccgacttcaagtaggcgaggagcagtggcattacctcccttgaatagctgctgatatggggctgtaggttttctgagaactggcccagggcaaacagcgcagcattgcgtacaacttgcgaggggtcctccaggcccttgcacacaatctgcagcagtgggggcagcagtctctgcctgatgtggtcgccagctccgtcagacagcacggccagcaccaggagtcagctttgcgctggtatgggctcctctccgcaaagcctcttccaacatgggcatcagctggggacagagcttctcggggggcaggtgtagtgccagcatgtccacaacttgtacagcgaaatgcttgggagtctcccccatcagctcaatctccaactcttcctcttctgaatcctggtcctcgggatccaactggcctggtgggggctcagcagccacaatggggaaaagggtgtgcagcaagggtgscaggagacgattcttcagtaaggccttgctcttgactttaccaagaaagtgaggcagcagagaataccgtatngtatcgcattnccaggccacatttctagctacctccaggcagaatgtgaggacttcagagaggtaggggtgatgaccggcacctctgactccaacagttcatccaaanctcaaggctcacagcctttgcctcatctatgggatcagagtctgcatggccatgatcagcttgggcaccaacatccgagcgagaggcacatcttcagtgctgaggtagggagccatggtggtcagagtgcgcagggagtagaagagcagcccaggagagcccacctcaccaagagtctcattcagaagccgcctgtgc

SEQ ID NO: 136 - DNA, 720 bp, Homo sapiens
  SITE (657): n equals a,t,g, or c
aagcctgggcttttgacctgtccttggaggcgttgcggcggacttttatcctctccttggggtccgtggcgttctgggagctgctgacagcgcctctggagcaggtggcagatgacagcctttatgagttcctggattttgtggatgccactgaccgatacagaagcctgtgggtctggaggttgctgggcatgtcggcaggcgtgtgtggcatcacagccttggtggggcagctggactgcttcctgatgaccagtggcccccgaggtgtggtccacttctatgggtactcggtggtcagcaccctggccttactggtgagcattgcctttcccattcccatctgtcagcagtgggagcccagctacaaaagggtcaaagcactgtccattgtggggggtgacccccacctcattctcctcgcctccaccactgttttggtaggagccatcgtcagtactgtccagaactttctgttctggcacatgaaggaccatgggagcggcgagctggtcatgggtttctcggtcgccctcagcttgctgggggaaattctgcttcatccgttcaaagctacattgcttaggaaactgtccaggacgggcctsgtggggctggggctgagctgcctcgctgggcagctgctgtactactctngcctgtgagctggtggtccgtctccccattaagatctgagtgccattagcaacagagcttttt

SEQ ID NO: 137 - DNA, 463 bp, Homo sapiens
agggacgtgctgggatgtgctggccaagccttgctggtctgccaccttgtcctcgcccctgaagggctccagtagccagcgagggccagcatggcctcccccgccccagcatgcctggggtctctgctttcatggactgtttgtgggtggggtgaggtggtcagtggtcctccttgtgctgtgtctgcctggggctgctcgtgggcaacgtgggtcactccctctgtcgtggtgcagctggcaccatcaggtgctgttcaaacccctctgagccccgagctgcttgkgatctcatttcaactccatgcagcccctctagggcagttttatttccccattttacagatgggaaaagagaaactcagattgcgtaacatgcccaaggaagcaccggycccagwgtttgytttgtttgwtttgsttttgaggagsagmctctgtcacccaggctggagwgctggag

SEQ ID NO: 138 - DNA, 699 bp, Homo sapiens
  SITE (155): n equals a,t,g, or c
  SITE (656): n equals a,t,g, or c
  SITE (658): n equals a,t,g, or c
  SITE (664): n equals a,t,g, or c
  SITE (678): n equals a,t,g, or c
gaatgcgggaataactgagattagcagaactgagctctggcagaaggaattattcaccactcttctcggagcaccttccataccgtgttgcctaacctttccaagtagcctgcatcctgtgcccagcctagttgcacctctttgccctcagatantgacttttggggcactgtacatcactctcattcggcatcttttacctggtggtggtagtgagagatagtcgtcttctctcttctctcctcttgtgttctgagccaaggtacgcagtttctgggtcacatctccaaccagtctcctaaagtgtgttgaccaaaggtgttgctgagtttgaacacattgcatatttaaattgcaataggacatgtgggtgagcaagttagttattttgtctctatgggacagctttgccattctccttcttgtcttcccagtggggcattctgccttttgttaagcagtgttctgggaattatagttctgaattccactgacacaatctcctcttcccaccctccgctctcctcaaacttgccctcatggggctacactaccacaaaggcacatctctccttagggctggwgggctttgctggsaaggagaacatgaaagaattgyatgyasagagytccagaagcttctagacatttcctgncntgttgnttgcggtgggtttncttgaggcacaatattgttca

SEQ ID NO: 139 - DNA, 950 bp, Homo sapiens
ggcctctgctcgcgctgcctgctcggagccgcttgctcggctgcctctggctgggctccgcgatcctctcccccaccctcgggcactgctccgcctccctcccggcgggctgtccccgcagtgctcccggacccggcgagccttcggggcgcgcgtcgctggtggtggttgaggctctagcgataataaatgatagaggatacaatgactttgctgtctctgctgggtcgcatcatgcgctacttcttgctgagacccgagacgcttttcctgctgtgcatcagcttggctctatggagttacttcttccacaccgacgaggtgaagaccatcgtgaagtccagccgggacgccgwgaagatggtgaagggcaaggtagccgagatcatgcagaacgatcgactcggggggcttgatgtgctcgaggccgagttttccaagacctgggagttcaagaaccacaacgtggcggtgtactccatccagggccggagagaccacatggaggaccgcttcgaagttctcacggatctggccaacaagacgcacccgtccatcttcgggatcttcgacgggcacgggggagagactgcagctgaatatgtaaaatctcgactcccagaggcccttaaacagcatcttcaggactacgagaaagacaaagaaaatagtgtattatcttaccagaccatccttgaacagcagattttgtcaattgaccgagaaatgctagaaaaattgactgtatcctatgatgaagcaggcacaacgtgtttgattgctctgctatcagataaagacctcactgtggccaacgtgggtgactcgcgcggggtcctgtgtgacaaagatgggaacgctattcctttgtctcatgatcacaagccttaccagttgaaggaaagaaagaggataaagagagcaggtggtttcatcagtttcaatggctc

SEQ ID NO: 140 - DNA, 2952 bp, Homo sapiens
  SITE (3): n equals a,t,g, or c
  SITE (12): n equals a,t,g, or c
  SITE (199): n equals a,t,g, or c
  SITE (2938): n equals a,t,g, or c
  SITE (2952): n equals a,t,g, or c
ccnggagtcatnatggggtgggtaccccagagtggaaccaagctttgggcaggggtgccctgggcttacctgtgagggccagtgarccccctccctytcccagtgcccctactttgccagcagtgaacccacccctttcctgccctgcagcgtaamcattccccagcctcctacaggcagaaaaacacctccaagctgncagctgggccaggccccgcccaccaagctgttttcytaagmcagcyttccgagcaggctatttttggccctcgtgacagtgattgatagctgctggraaggtataaaagcagcttgcctgcgaaggttcttcacactgctcagggaagagcytgctacggtggactgtgagactcagtgcactgtcctcctcccagcgaccccacgctggaccccctgccggaccctccacccttcggcccccaagcttcccaggggcttcctttggactggactgtccctgctcatccattctcctgccacccccagacctcctcagctccaggtaagagagagcagctgcccttgggtttgagacaaaacacaagggctttgtttatttttgagggcaattcccagcctgaacttgcacagcctccctatgggttagagaccagggctgtctgtagagggctttgcatttataaagggattcaggggttatttcatgcatttcctacaacatcctggccaggggtatttataaccctgttttatggatgggtaagtggaggcctggagaggtggccttgccaaaggtcccatggtcagtgcgtggccgatcctggttttaaacccagccttcctctgaccagtgtttgttaggttaggttctcttatctgtgcacattctgaaacgataatgataaaatcttaagcctttggggtttttaacctgaacaggaagaaaagatcccagcagtcggagctctggtctgggctctgtagacttcaaattgctctcagggcaccggattcctacaggcagccccagaggagtgtggtgacgctgaggggcggtgggacgcatggcaggccctcaccaccaggcttctgtttcccaacaggttgccacctcctctcgccagagtgatgaggtcccggcttctgctctccgtggcccatctgcccacaattcgggagaccacggaggagatgctgcttgggggtcctggacaggagcccccaccctctcctagcctggatgactacgtgaggtctatatctcgactggcacagcccacctctgtgctggacaaggccacggcccagggccaacccaggccaccccacaggccagcccaggcctgccggaagggccgccctgctgtgtccctgcgagacatcaccgcacgtttcagtggccagcagcccacactgcccatggctgatactgtggaccccctggactggstttttggggagtcccaggaaaagcagccaagccagagggacctgccaaggaggactggcccctctgctggcctctggggtccacatagacagatggacagcagcaagcccatgggggcccccagagggaggctctgtgaagccaggatgcctgggcattccctggcaagaccaccgcaggatgggcagcagagctctgacctaagaagctggacttttgggcagtctgcccaagccatggcctcccgccaccgcccccgccccagcagtgtcctcagaacactctactcgcacctcccggtgatccatgaactctgacccctccccagtaaaggcttctgtagagagcatgctgggtctgcatctcctctcgtctcctccatggtggtcactgcccctggcaggtctctgaaagggaaatgcttttctgcagaggcccctgcttgggcagttcacagtgagaccgaccccctctgaatatgataacagcctgtttcacatgaggagatgttaccaatcccgttcgctctgacccttgctggctgatcaccttgagcaacttacttaacatctgtgttcctcagtttctcatgggtaatatagggataattactggcacctgcctcccaggccattctgacgtgtaaccgcatataggagcccactggctgagtagctaccatcatcgctggtggggaaactggtggtaggggtgtgagggtagtgggggtgtcagccccccaggtgtttcagaacaaggcctcgggcactcccaagtctgcctcttggctcccaccctcaaagcccatgttctgtgaggcccaagagaacacatggagtcttagcaaatgcactaatgtattccgggggactgtcacctggcaccactggggcactctgctggctacaactcatacgtcctgtggtggcattgggagagttcccccatgatgagggccaagatagaatctgtaccactcagtgctaccatccccacccctacaccacttccacacaggggcctcatggcatggtcagggtcccagctgtgggtgagagcagggcactgtccagctgtccactggggaagtcaagatgtcctaaggcccaggycagggcatctggagtctgaaggaccctagttcctagaggcatctggcagcaagaaggtgaggcatcagggaacgggaatcaggctgggactgatcagaggtgaagggacagagagaggagaggaggaagattgagctgggggcaacagccaagctcacctgggcaggtctctgccacctccttgctctgtgagctgtcagtctaggttattctctttttttgtggctatttttaattgctttggatttgttaaatgttttctgtcttctgttaagtgtgttttctctggagatagaatgtaaaccatattaaaaggaaaaagtttcagacaagcaaaaaaaaaaaaaaaaaaaaaaaaaaaaaaaaaaaaaaaaaaaaaaaaaaaaaaaaaaanccccgggggggggn

SEQ ID NO: 141 - DNA, 776 bp, Homo sapiens
  SITE (631): n equals a,t,g, or c
  SITE (755): n equals a,t,g, or c
  SITE (761): n equals a,t,g, or c
  SITE (768): n equals a,t,g, or c
  SITE (775): n equals a,t,g, or c
gcagagactttggatgagtttttagcttctggtaggcagttagagtaagaagcataatgcctaaatcaaccagggtttgggttttctcaaggctgtgtttcagtctttatctaagttctggtgtgttttagtccttatgaggcctggtgtagtcctttagcagtctcaacgaaaaccaatgccattcctccacttttaatctccctagtaccacaaaactgcttagaagactgtttaagttcttcagcctcttagctgccactttttgcttgatttctctcagactgtgtcacttagaaatcatcaaatatctcaagaaagaaagtacctcagattattggggtttgttttctgcctgtcccttctctgtaagatattagcccttcaattaccagctctcttagtagcaatgaagtctaagttttgctttgctagccccatgagactgccaaaagctttacttgcattctctgcctgttggcagctgctttctgcttggcttcttcacctttctccccacactgcttacaaatcagaaaaagtctcaagaataaaagcaaaataaatggttgggctcaccttactgagtttctctcctctcataaatcttgractcttcagtcctggctgntttggtagctttccaatggcttyacatggacacttcccaaccccggccccacgatctggcytttcttggaagtctcaactaagcctgggtctggctataagctgggtaacaatctctgggaaangggccnattttcnggataana

SEQ ID NO: 142 - DNA, 702 bp, Homo sapiens
  SITE (3): n equals a,t,g, or c
  SITE (14): n equals a,t,g, or c
ctnctatagggaangctggtacgcctgcaggtaccggtccggaattcccgggcttctttcttgtgttgctgctttctccttcccagctctaaactcccatggtgctggagcagccagagaagaagtgttactagacctgccactgctacctacagtgagccccattctgcacacagaggctgcggactcctttttcccaatcatagaccagaatgcttgtgaaagaagatgtggctgttctgcaggttggagctctaggatcggaagaactcatctgtatcacatatgatccagctgaaagtccctacaaactgggccctctgtgtctttagaagcagcttccaagggcaggaagacttccagagtgcaggactgagcgtgctgctaatcttgttctggtcgagagactgatgagagagacaagaattatggcgcgagaaaagcagcagcagcagcagcaagtctgcagaggggaatgccaaactcgctactgggtgtttttttttgttttgttttgttttgttttgttttgktttgtttgatacagagtttcactctgtcacccaggctggagtagagtggtgccatctcagctcattgcaacctctgccccctgggttcaagcaattctcctgcctcagccttycgagtagctgggattataggcatgtgccaccatgcctggctaatttttgtattttt

SEQ ID NO: 143 - DNA, 798 bp, Homo sapiens
  SITE (2): n equals a,t,g, or c
gncaaaaagcaagwtggagtcaattatgkccaatttayctwactgtcawaatttttcaaaggcagtttcaaggttactattctcatgattcaacacatcctcaaggagtgagattcagtctgtgtaagtgtatcatgactttctataacacgccttgtcatgcactcttctaccctgctagaattggagtctggcctcagctggttcctaccagcagtactgccatcacctcatcctcatctgccccatctgttgttttsgaaccacttgtgtcctctgaaatgcatatgttgaagtcctaaccacctgtgcctcagaatgggactatgtttggagaaagggttttaaagaggtacttaaagwtaaatgagatcattactgtgaaccctgatccaaattgacttatgcccttataagaaaaggaaatttggccacttacactcacagaggaagaaatcatttgaagacacagagagaagagggccgaggagagaggtctcagagaaaccaacccaatgacatttcgtcttggatttccagcccccagaattactggaaaatacatttttcttgtttaggccacccaatctgtactactttgttatggcaaccctagcaaactaatgcagtcaccaacccagggtgaaaatgggacattcccaactctagctcttaggccaagcttatttgtaatagattcttgttttcaaaggatatagatattgagattctcaatgtatttgttaaaatacattgtttcttgttaaaagcaaaaaaaaaaaaaaaaagggcggccgc

SEQ ID NO: 144 - DNA, 566 bp, Homo sapiens
  SITE (442): n equals a,t,g, or c
  SITE (484): n equals a,t,g, or c
  SITE (535): n equals a,t,g, or c
  SITE (537): n equals a,t,g, or c
  SITE (549): n equals a,t,g, or c
  SITE (564): n equals a,t,g, or c
ggcacgagctcgactcactgcaacctccgcctcctgggttcaagtgattctcctgcctcagcctcccgagtagctggggttacaggcatgtgccaccacgcccagctaatttttgtacttttagtagagacggggttttgccatgttggccaggctggtctcgaactcctgacctcacatgatctgcgcacctaggcctcccaaagtgttgggattacaggtgtgagccatcgcacccggccaggcttacctctttgtacctattttgttgaagctgaactgaggcctggggtgcttgcactgtcttggggccctgaaaagtccaaggcacagcagtcgataaatagcaactaaataaatgatgataaatatctaatcaaagttcgatgatagatatcaaattatattaataaatatcaaataacatcsattgtaaatatcnaataaaaattagattcttttaatttttttaaagacacagtgnccagttctgttgcccaggctggagtmcagtggcacgatcatagcttactgnancttgaactcccnagcttaagccatctnca

SEQ ID NO: 145 - DNA, 1939 bp, Homo sapiens
gcccagcccctgctccctgccttgtcccagcaccttcacggagtgttgggccaaccaatagccctgagccaatttaacagtcccctggctggttttgaggggacagtcctttattgtttttttccaaaaccgggcagaggggtggcagctcttgtgcctggggtccctgccagtccgtggaccaggcctggagactggccatctggctccgtgcccgcttcgtcctcacattaccccgtcctctgcccacccacccccaagatgccacttgggtgtctggggtcttggggtgcccccagaagtcttatacctgccaccctcccctaccccaggccgtccaccaactaagccagctgccacygtgtactcggtccgggacccttggcgacagaagacagcctccgagagcgcgggctccaagggcaataaagcagctccactctctctacttggttctttttgttcttgcgtctccagtcctgtggcgggggccagtgcctcccctcctctgggcgtggtctggtccctgaccctgcagggagccctgtggccagcgctgtgggtgggaaaggcgactgctcctgcctgggctgcagctgggcctgacctggctgcaagcacaggtgttgctttttgggggaagggatgtgtcggggctcgggccctgccctcagggttctccagcaacacctagggtgaggaggcagcttccgctaggccacatcattggctcagctcacgggactggggctctgacggtttaggggcgrctgtggcattgaggggcagggcttggccagtgctcttggcgtcctctgggttccagctgtccctgtagccggggcagtgtcggcagcagcagcccaggctgggcactgcggccatgtagagtagagggtggacacagaaggccaggggcatgaggccccgcatcacctggtagcccacgtagggccccagctccagggctgctgtggcctgggctatgtctgcaaagctcgggcagcgggtgctccagcgccgccgagcatccacgttgagcacccgcatgatgtggtagggcacataggagctggcgtagagggccacaccactggccaccaacgctgccacacgcagcttctcggccacagtcatgcctgggctgcgtagcacggcccgcccgagggcgccgtaggctgccagcgtgagcagcagcggcaggccgcagcccaaccccgccagcaccaggctatacgctctgtaggccgccagcccgtggtctgctgtccccagacacttgatgcaggcctcgggcctggccacgctgcagttgcccgccccctgctgcggcctcttcaggtgggagaagctgagtgtgggcatggccagcagggcggccaggacccagccggcagcgctcacggcccaggcgtgcttgggtcgcaggtggcttcgggcgaagaaggggtgcacgatgcccaggtagcggttgaggctgatgcaggtgatgaagatgacgctgcccagcaggttgcaggtgaagaggaagcgctccaggcggcacgcggcctccccatagcgccagtgcttggggggatagaggtaggcggccagcgggggcagcgtcagrgcgcagagcaggtcgctgactgccagctggacagagaagaccacggcggggtgccatgggcgctgcttccggatgctgaagcggtacagggccaggccattgctggccacggccaccaggaactcaaccaccagtatgggccacaggaagtccccctggaacccactgagtttgtcgtcggcagctgccaagaagttggcagggcaggacttggcacccgagacgttggctgccatgctcccgtgccgatcctcagcctgtgtctgctacccagttccccagcccctcccccagtcaccagtggcttagtgggccctgccccagccc

SEQ ID NO: 146 - DNA, 619 bp, Homo sapiens
  SITE (124): n equals a,t,g, or c
  SITE (128): n equals a,t,g, or c
ggtgataaaagtccttccagtcccatctgtgtggctgtcacttcttcttcccctgtcctgctactccaagcacagtcattcctccaaagtgctgggttcctcctggcccagccggggccattcnttantgggcattattcttgcaagtgtgagagccagagaggggcatgtgtagtatccatgctcacaaacagggctccatcctcctttgtgtggtttctgtgtctagcatgtcatcttccttcctgcccctctgcaactgaggaatttgctgtctttatacccaagtatcacagcagcagaatgggggctgccccatgccatgtcctcggtcatggtggtatcaaaggcaacacctgccaggacaatgctggttatgatttctgccgtcccctgggactggcctcattccttaagaggcaagattaaaaaaaaataaaaagccaggcacgagggctcatgcctataatcccagcactccagcactttgggaggccaaagcggaggattgcttgaactcaggagttcragaccagcctgggcaacatagcgagaccccatctctacaaaaaatttaaaaatgaggcaggtatggaggtatgcgcctgtggttccagct

SEQ ID NO: 147 - DNA, 2032 bp, Homo sapiens
  SITE (5): n equals a,t,g, or c
tcccnctcgaaataaccctactaaagggaacaaaagctggagctccaccgcggtggcggccgctctagaactagtggatcccccgggctgcaggaattcggcacgaggcaacgcgctgtccatgtcgcgggcctcgctgggactccctgggagatgaggccgcgaggtctcccgccgctcctggtggtgctcctgggctgctgggcctccgtgagcgcccagaccgatgccaccccggcggtgacgacagagggcctcaactccaccgaggcagccctggccaccttcggaactttcccgtcgaccaggccccccgggactcccagggctccagggccctcctccggccccaggcctaccccagtcacggacgttgctgttctctgtgtctgtgacttatccccagcacagtgtgacatcaactgctgctgtgatcccgactgcagctccgtggatttcagtgtcttttctgcctgctcagttccagttgtcacgggcgacagccagttttgtagtcaaaaagcagtcatctattcattgaattttacagcaaacccacctcaaagagtatttgaacttgttgaccagattaatccatctattttctgcattcatattacaaactataaacctgcattatcctttattaatccagaagtacctgatgaaaacaattttgatacattgatgaaaacatctgatggttttacattgaatgctgaatcatatgtttccttcacaaccaaactggatattcctactgctgctaaatatgagtatggggttcctctgcagacttcagattcgtttctgagatttccttcgtccctgacatcatctctgtgcactgataataaccctgcagcgtttctggtgaaccaggctgttaagtgcaccagaaaaataaatttagaacagtgtgaagaaattgaagccctcagcatggctttttacagcagcccggaaattctgagggtacctgattcaagaaaaaaggtccctatcactgttcagtccatcgtcattcagtctctaaataaaacgctcacccgacgggaggacactgatgtgctgcagccgactctcgtcaacgctggacactttagcctttgcgtgaatgttgttcttgaggtaaagtacagcctcacatacacagatgcaggtgaagtcaccaaagctgatctctcattcgttctggggacagttagcagcgtagtggtcccactgcagcaaaagtttgaaattcattttcttcaggaaaatacccagccagtccctctcagtggaaaccctggttatgtcgtggggctcccattagctgctggattccagcctcataaggggtctgggattattcagaccacaaatagatatggacagcttactattcttcatagcacaactgagcaagactgcttagcactggagggggtccggaccccagtattatttggttacactatgcaatctggctgtaaactaagactgactggagctctcccgtgtcagctcgtagcacagaaggtgaagagcctgctgtggggccagggcttcccagattacgtggccccttttggaaattcccaggcccaggacatgctggactgggtgcccatccacttcatcacccagtcattcaacaggaaggattcctgccagctcccaggggctttggttatagaagtgaagtggactaaatacggatccctgctgaatccacaggccaaaatagtcaatgtaactgcaaatctaatttcatcctcctttcctgaggccaactcaggaaatgaaaggacgattcttatttccactgcggttacttttgtggatgtgtctgcacctgcagaggcaggcttcagagctccaccagccatcaatgccaggctgccctttaacttcttcttcccgtttgtttgacaatgctcagatgcatcagttccttaatatacacgtgaaatttgaaaactgtacattcggtgagattaaattttatatacaactarmaaaaaaaaaaaaaaaaaaaggtcgacgc

SEQ ID NO: 148 - DNA, 1048 bp, Homo sapiens
  SITE (965): n equals a,t,g, or c
  SITE (1024): n equals a,t,g, or c
  SITE (1026): n equals a,t,g, or c
tggatgaatgggtttgatagttgtgcttctatttcccaacctctgtatgtgtacctttcatgcaggtggatttcagtgtgttctttggatggcaggccttaagagaagagtcccactgcacagcctcagatacttcatctccatggtgggtctcttctccaaaccaggactgcttccctggtatgccagaaatccaccaggatggtcacagctctttctgggcacagtatgtaagggagatttcacccgtgtgatagccacgaaatgtcagaaaggacaaaaaagtcagaagaaaccaagccatcttggaccactagatggttcctggcaggaaaggctggctgatgttgtgacaccactctggaggttgagctatgaagaacagctcaaggtgaaatttgcagctcagaagaaaattttacaaagactagagtcttacatccaaatgctcaatggagtcagtgtgacaacggctgtacccaaatctgagaggctctcttgtcttctccatcctattatacccyctcctgtcatcaatggttaccgaaataagtccaccttctctgtgaaccgaggtccagatggcaatccaaagactgtggggttctacctgggaacttggagagatgggaacgttgtctgtgtgcagtctaatcatctgaaaaacatccctgagaaacacagtcaagtggcgcagtactatgaagtattccttcgacagtctccattggagccctgccttgtatttcatgaaggtggatactggcgtkagctcacagtccgcaccaatagccaagggcacacaatggctatcatcactttccatccccagaaattaagtcaggaggagctccatgttcagaaggagattgtaaaggaatttttcatcaagaggtcctggagcagcctgtggcttgacctcactttacttccaggaaagtaccatgacccgttgcaaccatcancagtctccctatcaagcttctgtttggggaacctacatcttttgaagaacttctgagcntngaaagatccggatctctccaag

SEQ ID NO: 149 - DNA, 701 bp, Homo sapiens
  SITE (691): n equals a,t,g, or c
gcttaattctcctgagaacatgacatcacgcaaggctacatggagataaatctcttgaagagcaaactgtcaggaaatgtccaacacaaatggcagtgcaatcacagaattcattttacttgggctcacagattgcccggaactccagtctctgctttttgtgctgtttctggttgtttacctcgtcaccctgctaggcaacctgggcatgataatgttaatgagactggactctcgccttcacacgcccatgtacttcttcctcactaacttagcctttgtggatttgtgctatacatcaaatgcaaccccgcagatgtcgactaatatcgtatctgagaagaccatttcctttgctggttgctttacacagtgctacattttcattgcccttctactcactgagttttacatgctggcagcaatggcctatgaccgctatgtggccatataagaccctctgcgctacagtgtgaaaacgtccaggagagtttgcatctgcttggccacatttccctatgtctatggcttctcagatggactcttccaggccatcctgaccttccgcctgaccttctgtagatccaatgtcatcaaccacttctactgtgctgacccgccgctcattaagctttctgttgtctatgcaagacatgcatgtmattstgctgaactctcagtcctacatcgntgggccagct

SEQ ID NO: 150 - DNA, 617 bp, Homo sapiens
acgtgaaaatctgccttctcaccatgaggcttctagtcctttccagcctgctctgtatcctgcttctctgcttctccatcttctccacagaagggaagaggcgtcctgccaaggcctggtcaggcaggagaaccaggctctgctgccaccgagtccctagccccaactcaacaaacctgaaagccttcacagcagtgagctgcaatgttggagggcttcatctcgggctgcaaggaccctgggaaagttccagaactccacgtccttgtctcaattgtgccatcaactttcagagctatcatgagccaacctcaccccacagggcctcagtcgccaccatgtgggcctctccagtgcaaaccaccgagcattccaccatgaccggtcacagctacaaatccagagaccatcaatcctgctagagtgcagggtggcaagcacccaagggtggctgaccaagactgcagagtctcctccatcttcaggtccattcagcctcctggcatttaactaccagcatccagtggkccccaaggaatcccttcctagcctcctgacatgagtctgctggaaagagcatccaaacaaacaagkaataaataaataaataaactcaa

SEQ ID NO: 151 - DNA, 881 bp, Homo sapiens
  SITE (864): n equals a,t,g, or c
  SITE (869): n equals a,t,g, or c
gcccacgcgtccgcacagctcccttcccaggacgtgaaaatctgccttctcaccatgaggcttctagtcctttccagcctgctctgtatcctgcttctctgcttctccatcttctccacagaagggaagaggcgtcctgccaaggcctggtcaggcaggagaaccaggctctgctgccaccgagtccctagccccaactcaacaaacctgaaaggacatcatgtgaggctctgtaaaccatgcaagcttgagccagagccccgcctttgggtggtgcctggggcactcccacaggtgtagcactcccaaagcaagactccagacagcggagaacctcatgcctggcacctgaggtacccagcagcctcctgtctcccctttcagccttcacagcagtgagctgcaatgttggagggcttcatctcgggctgcaaggaccctgggaaagttccagaactccacgtccttgtctcaattgtgccatcaactttcagagctatcatgagccaacctcaccccacagggcctcagtcgccaccatgtgggcctctccagtgcaaaccaccgagcattccaccatgaccggtcacagctacaaatccagagaccatcaatcctgctagagtgcagggwggcaagcacccaagggtggctgaccaagactgcagagtctcctccatcttcaggtccattcagcctcctggcatttaactaccagcatccagtggtccccaaggaatcccttcctagcctcctgacatgagtctgctggaaagagcatccaaacaaacaagtaataaataaataaataaactcaaaaaaaaaaaaaaaaaaaaaaaaaaaaaaaaaaaaaagggcggccgntctanaggatccaagct

SEQ ID NO: 152 - DNA, 576 bp, Homo sapiens
  SITE (436): n equals a,t,g, or c
  SITE (488): n equals a,t,g, or c
  SITE (510): n equals a,t,g, or c
  SITE (531): n equals a,t,g, or c
  SITE (551): n equals a,t,g, or c
ggacgcagccaggttgtcccagctttcgctctagcgccagcgcggaggacgcgatgtctgggctgtctcgcccgctgcttttggccgtcggctgcctggccgcgctctgcgtaatcacagcggctgggaacaccaccctggccccgaacgtgactacagcctcgtctccaccgcccaccaccacgacagtcccggtgtcaccgacgactctctcgccgctgccggtcaccactccagcaccagatatctgtggaagccgaaacagttgtgtttcctgtgttgatggtaatgctacctgcttttggatagaatgtaaaggtaaaagctactgttcagataattcaacagctggtgattgcaaggtggtgaacaccacaggattctgttctgctaaaaccacaactctgccttccactactacaacttccaccacagntactacatcaggtacaactaataccactctatctccaactatacaacctacncggaagtctacctttgatgcangccagtttcattggaggaatngcccttgcttgggtgtgcangctgtaattttctttctctattaat

SEQ ID NO: 153 - DNA, 637 bp, Homo sapiens
ggcacgagcccaggctcaagcaatccttctgccttgacctcccaaggtgctgggattacaggcatgagccgctgcacctggccttcatttagtttctttctttcttcctttctttctttttttagatggagtctcgctctgtcagccaggctggagggcagtggcgtgatcttggctcactgcaacctccgcctcccaggttcaagcgattctcctgcctcggcctcccaaagtgctgggattacaggcatgagccgctgtgctgacgttcatttggtttctataatcaccaaagcccatctggtctcatggcccttgcagatgaatatcctcccttagaacacatcttccccaagagttcaccctgatggcaacttctcatccattaggcctcagctttaatgtatcatcttcagggatgctttcactgtccctcccctccagtgtaatctagatccctgtctctattacccagcactgtcaacagatagaaatgttccctatctgtcctgtccaatattacagccaccactgtatgtggtcagtgagcacttgaaatgtgaactgaattttaagattcgatttaatattaatttatttaaatgtaaacaaccacatgtggccagtggctaccaga

SEQ ID NO: 154 - DNA, 800 bp, Homo sapiens
  SITE (4): n equals a,t,g, or c
  SITE (19): n equals a,t,g, or c
  SITE (61): n equals a,t,g, or c
  SITE (100): n equals a,t,g, or c
  SITE (150): n equals a,t,g, or c
  SITE (156): n equals a,t,g, or c
aagnaatggaatcaaagantaattttcttggtctctgtgtctctggtcttctcctaagtcntggagcttgaaaatctgccgcagaatggccgccagtgtnacagtgcaaggggaacagcacccatggatgctcctctgaagagactttcntcattnactgccgaggccccatgaawcaatgtctggtasccaccggwaytmasgaaccgraaaaccmaagctatatggtaagaggctgtgcaaccgcctmaatgtgcmaamatgccmacctgggtgacgccytcagcatgaaccacattgatgtctcctgctgtactaaaagtggctgtaaccacccagacctggatgtccagtaccgcagtggggctgctcctcagcctggccctgcccatctcagcytcaccatcaccctgctaatgactgccagactgtggggaggcactctcctctggacctaaacctgaaatccccctctctgccctggctggatccgggggacccctttgcccttccctcggctcccagccctacagacttgctgtgtgacctcaggccagtgtgccgacctctctgggcctcagttttcccagctatgaaaacagctatctcacaaagttgtgtgaagcagaagagaaaagctggaggaaggccgtgggccaatgggagagctcttgttattattaatattgttgccgctgttgtgttgttgttattaattaatattcatattatttattttatacttacataaagattttgtwccagtgaaaaaaaaaaaaaaaaaaaaaaaaaaaactcga

SEQ ID NO: 155 - DNA, 684 bp, Homo sapiens
  SITE (668): n equals a,t,g, or c
ctcactaaagggaacaaaagctggagctcgcgcgcctgcaggtcgacactagtggatccaaagaattcggcacgagtctctctctctctcctttttttttacagggtattactctatgcccaggctggagtgcagtagctcaatctcagctcactgcagcctcaacctgctggactcaagcagtcctcccaccccagcctcccaagtagctgggactacagatactcaacaccacacccggctaatttttttgtagagatggaatttcaccatgttgcccaggctggtctcgaactcctaggctcaggcgatctgcccacctcaacctcccacagtgctggtattacaggcgtgaagccaccacgccccaccaagattgatttcttctgaggggtctcttcttggccatcttctgtgtcttcccatggtcttccctctgttatgcgtctttgtcctgatttcttcttccttggctggtgaggaggccgccgggctccgggtccagaagctctggccggctgttgktctgagccatctgccggtctgctggtttcactgctctggaatctggagtgaggtcattgagctgaaggttggatgggagggacatgktctcccgtggcaggcgcacgttgktgagtttaaggtggtggagcacttgatatcanaaatgggtgccggcgg

SEQ ID NO: 156 - DNA, 1574 bp, Homo sapiens
acacagtgctaggaggtttaaagggtgtaatgtgttggtcacatcacaaccagtaagaaacgcttggtaggttatccacatcttttgctgactgtttccatatacaattctggtcaccgtattttccaaagctaaaatctgaggcgtgggctgatggtttttgaaatcaggattaccccaggaagaaccaggtcctattactaattttcctgattctgaggctctgaaggcttgtctgagacacattccggagacctttgtaccagaacttggatgcatagtccaccttactactgatacacgcctgagcaccctttagggcgaggcgccgcctcctgcctgctgtcctgtccctcagcatcagaagagttgaattcagcaggagacgggagcccggtgtccatgagggaagaggggtcgcgcttggtttctactgacccccatgaagatttcagacttgcagtgcggccacctggccctgccctgcctctctctttctcatacagctttaaaactttactacttttatttaaaaatgaactggatgggagagaagtagcgtcccctaccctacaagtcacacattccggggakgggggtggggggtggaggcaggaagtcatgggggtgggggtgggagcacgggaacagctttcttaaggcctcagggtcctgttttccctggcctcttctagagggcccgtggacaggtcgcagtgcgtgcttatttggaaaccaggtgtgtgagccgaatgcctgccaggccatgcactcagcagaggagcccttgtacctggctgccctgagaggagcaagaggccacctcccatgtggctctagacaccacgtgggctcattagccccagcgtctgtgccggctccaggtgcctgcctctgggtgtgtgagtgggagactttgctccctggcctcatcctagagaggcccctggtgcctagtgctgaggcctctggggctggaaagcctcagcagaaaggaggcactactgagcaactatgcattgtcattgtcgggtttggggctttcggtggttccttggtgactgggaattgcttgtgtgcatgtgttgggtgcatgcttccgggtctcagctgccccaggcccgcacaggcaaccccttcccatccaaagccattggtggagcttctctggaatcatttgccaaaagcccaaggcagaatccaagggtccaagaccatttccatggagctcatgtttttcttttctgtaggaacttttttttaaccagcacccaccataattccgaaggccacgtttcatctttcctggatcactacagtgaagtattacagttgtacagttcccagtctggccttggcttgctcggataaaactttgtatgtattttgtatggcatagattctatattgtaatgatgtcctatgcaaaaagaaaaattaacgaaattgtaaattttattgttttaacgtgtatgcatgtttagtgacgtttacattttgaaataaaatttatgattcattaaaaaaaaaaaaaaaaaaaaaaaaaaacycgagggggggcccggaacccmatt

SEQ ID NO: 157 - DNA, 2050 bp, Homo sapiens
  SITE (878): n equals a,t,g, or c
  SITE (1573): n equals a,t,g, or c
ggcacgagtgatgctccagtggcaggagcaactcaagttcatcattgtcctgagagagaggagcagcgcggttctcggccgggacagcagaacgccaggggaccctcacctgggcgcgccggggcacgggctttgattgtcctggggtcgcggagacccgcgcgcctgccctgcacgccgggcggcaacctttgcagtcgcgttggctgctgcgatcggccggcgggtccctgccgaaggctcggctgcttctgtccacctcttacacttcttcatttatcggtggatcatttcgagagtccgtcttgtaaatgtttggcactttgctactttattgcttctttctggcgacagttccagcactcgccgagaccggcggagaaaggcagctgagcccggagaagagcgaaatatggggacccgggctaaaagcagacgtcgtccttcccgcccgctatttctatattcaggcagtggatacatcagggaataaattcacatcttctccaggcgaaaaggtcttccaggtgaaagtctcagcaccagaggagcaattcactagagttggagtccaggttttagaccgaaaagatgggtccttcatagtaagatacagaatgtatgcaagctacaaaaatctgaaggtggaagttaaattccaagggcaacatgtggccaaatccccatatattttaaaagggccggtttaccatgagaactgtgactgtcctctgcaagatagtgcagcctggctacgggagatgaactgccctgaaaccattgctcagattcagagagatctggcacatttccctgctgtggatccagaaaagattgcagtagaaatcccaaaaagatttggacagaggcagagctantgtcactacaccttaaaggataacaaggtttatatcaagactcatggtgaacatgtaggttttagaattttcatggatgccatactactttctttgactagaaaggtgaagatgccagatgtggagctctttgttaatttgggagactggcctttggaaaaaaagaaatccaattcaaacatccatccgaycttttcctggtgtggctccacagattccaaggatatcgtgatgcctacgtacgatttgactgattctgttctggaaaccatgggccgggtaagtctggatatgatgtccgtgcaagctaacacgggtcctccctgggaaagcaaaaattccactgccgtctggagagggcgagacagccgcaaagagagactcgagctggttaaactcagtagaaaacacccagaactcatagacgctgctttcaccaactttttcttctttaaacacgatgaaaacctgtatggtcccattgtgaacatatttcattttttgatttcttcaagcataagtatcmaataaatatcgatggcactgtagcagcttatcgcctgccatatttgctagttggtgacagtgttgtgctgaagcaggattccatctactatgaacatttttacaatgagctgcagccctggaaacactacattccagttaagagcaacctgagcgatctgctagaaaancttaaatgggcgaaagatcacgatgaagaggccaaaaagatagcaaaagcaggacaagaatttgcaagaaataatctcatgggcgatgacatattctgttattatttcaaacttttccaggaatatgccaatttacaagtgagtgagccccaaatccgagagggcatgaaaagggtagaaccacagactgaggacgacctcttcccttgtacttgccataggaaaaagaccaaagatgaactctgatatgcaaaataacttctattagaataatggtgctctgaagactcttcttaactaaaaagaagaatttttttaagtattaattccatggacaatataaaatctgtgtgattgtttgcagtatgaagacacatttctacttatgcagtattctcatgactgtactttaaagtacatttttagaattttataataaaaccmcctttattttaaaaaaaaaaaaaaaaaaaaaaa

SEQ ID NO: 158 - DNA, 638 bp, Homo sapiens
ggtgacagagagatactctgtctcttaaaagaaagaaaaagaaaaaagagaagggggatctgtggcaagagctggaaagtccccagacagctctgaggtaccgcctctcatgggctccgtggattatctcatggcctgtgtggctgtctgtctttatctctagtgacatctctgcttttctctgccaagatttatcccttctctgcagccacttgctgtccagcttcccttctttgtagaatctgcctctgcccaatacctttactttcgtgtggcctctctgggctcctccatatcatgacctgkcagctcctctttaactcctttcttctctcaagtgtttctcagatcagagaccagattgcaatgagagaatcagtttggtctggtagtatttcacgccaaaaagagttggtcaccctttggattatatgcctttggttcaggcacctacccctggtcctggctgttggggatggatggtgactgktatgtggcctttacaggctttaggcacaataaagctttcccaggttcagcctactgagtgctatggctatgacctggacattaaactggccctcataggttcagacctggccatggcaattgacgaaccctaccacagggctcttgga

SEQ ID NO: 159 - DNA, 1332 bp, Homo sapiens
  SITE (11): n equals a,t,g, or c
  SITE (50): n equals a,t,g, or c
  SITE (1323): n equals a,t,g, or c
gccgggatttncaggtgtragccmccatgcccagcccttttcaatattgnttttgaaaattccatcctatactgccaaatataaatatatcccaagaaattaaaatacagaaaatcaaattgcaaagaaaatatggttgcagaattcttgcaatttaattttagtaaattctttatcttttttattaccataccttaaaattgctatgcacatattttctgtctcagttatgtactcaactagaaattacctttacttwactacctgtattttattgaaatactgtgcccatcctgcatggactattttgcgtcacttattttatgaatatcactattggatatgctcttttgcaccaatagactcttattcaggtatgacacacagagacacaaaatgctaaattctcctttcctgtgaccatggcagaaactactaatcaatattcttgggcaaagttggttctcaagatgctcaagctctgctgttgtcataaagcattttggttctcttctgatactttttgaagactcatccatttttcattctttcagcaaacatgaccatgataccccatatagaccagatattgtgctacagttgcgaaaacaaagaataagagaggtcctcaagcggctcaacatctcatggtgaaaatgagatgctgagccaccactaacatgctagctgttaagtatgtccacttaaaagagaacacaggagaaacatctcaggcggactctgttggcgtggttggtggtgagggaatgttgaagagtggatagaggtataattaaaggctttctggatggcgtggtggcttatatgagtagtcccagcactttgggtgggattacagcacttgaggtcaagagctggagatgtgcctggccaacacggtgaaaccccatctctactaaaaatacaaaaattagcagctgagcgtggtagtgtggcgcccgcaatgccagccacacgggaggctgaggcatgagaatcacttgaactcaggaggtggaagtctcagcgggcggagatcgcaccactgcactccagccagggtgatgaagcgagactctgtcaatcaaacaatcaatcaatcaatcaatcaatcaaggcttcccaagggggaggaatctggcatttttgtaggcaaaggaaacagcttataagatgtgagagaacacagccattttagagaagtgtactcgtgccgaattcctgcagcccgggggatccactagttctagagcggccgccaccgcggtggagctccagcttttgttccctttagtgagggttaatttcgmgmwggggtaatcngcgtatcat

SEQ ID NO: 160 - DNA, 1267 bp, Homo sapiens
cggctgtttggctgctgacaacatgaagacttcctgcgatgagaacagaggcacaggtgccggccctacagcccccagaacctggactggagggggccatggggcaccggaccctggtcctgccctgggtgctgctgaccttgtgtgtcactgcggggaccccggaggtgtgggttcaagttcggatggaggccaccgagctctcgtccttcaccatccgttgtgggttcctggggtctggctccatctccctggtgactgtgagctgggggggccccgacggtgctggggggaccacgctggctgtgttgcacccagaacgtggcatccggcaatgggcccctgctcgccaggcccgctgggaaacccagagcagcatctctctcatcctggaaggctctggggccagcagcccctgcgccaacaccaccttctgctgcaagtttgcgtccttccctgagggctcctgggaggcctgtgggagcctcccgcccagctcagacccagggctctctgccccgccgactcctgcccccattctgcgggcagacctggccgggatcttgggggtctcaggagtcctcctctttggctgtgtctacctccttcatctgctgcgccgacataagcaccgccctgcccctaggctccagccgtcccgcaccagcccccaggcaccgagagcacgagcatgggcaccaagccaggcctcccaggctgctcttcacgtcccttatgccactatcaacaccagctgccgcccagctactttggacacagctcacccccatggggggccgtcctggtgggcgtcactccccacccacgctgcacaccggccccagggccctgccgcctgggcctccacacccatccctgcacgtggcagctttgtctctgttgagaatggactctacgctcaggcaggggagaggcctcctcacactggtcccggcctcactcttttccctgaccctcgggggcccagggccatggaaggacccttaggagttcgatgagagagaccatgaggccactgggctttccccctcccaggcctcctgggtgtcatccccttactttaattcttgggcctccaataagtgtcccataggtgtctggccaggcccacctgctgcggatgtggtctgtgtgcgtgtgtgggcacaggtgtgagtgtgtgagtgacagttaccccatttcagtcatttcctgctgcaactaagtcagcaacacagtttctctgaaaaaaaaaaaaaaaaaaaaa

SEQ ID NO: 161 - DNA, 476 bp, Homo sapiens
ggagactctagatccagacccacatggcacggggctgcctccctcaggcagttctcagccaggcccccacccagggcacaggctcaggctgagcggggtggtggatgggctggagccggggagaagggcagcaaggctggctggccgcagccctctgtggctggacacgacttggcaaggccgagggatctgagggctgggctactctcgagggctgccaggttcccagcttgctgcagggaaatgaagggggtgccgccctgaacaggcacatgcctaagcaaggtattgacgcttggataaagctggcaaccaccaggagaagcctttttgggatttttcaaatccttcgycatccgagctgtgatgatggagtggarcgtkgcacgggcccattggagttctgtkggctccatcggmactarcagggatttgracktcaggctggtgggccttgcaggaagcctgctccctgc

SEQ ID NO: 162 - DNA, 1040 bp, Homo sapiens
tcgacccacgcgtccgcccacgcgtccgcmgggagtaggagaatgtcttccagaaaaatacataagctagtttctgttctgtaaagtgatatctttcatacttgaccaaagttcccaataacttcccaaccactgttcaaaagctgtgatttttgtctccccttcccaccctccagccaaggagcagccctgcccagggggcattaggtgtgggtacccggggagcaccccgttcctggaccccagtgttgcatttcctggctgaggaagggtggtcatcccagctcctgccctaccctctcacttaactggagctttgggacgcaccctccacagtgggaggtggtggtgggtggcggtggcggggcctcacgacagcttggtgctggtaagaggaagcccgtggttctggctaggctctcatgtccagacagcggggaccaggggaaaacccagccccttctgtaatcccccttcatttcctaccttccttcctcctctgtttagcaaaggagggcagctcacttggatgtccttacaacgcccctggccccaggttgagcaataagaaaccagaaccttgcggcccagtggcccgggccagttcaggccgcctccccctcctctgcctggggccattgagcccagcctccagggcccgggtgcgtttgcaggccagtggccactgtccgggctgtgatggcaccaaggcaggtggagcaccaggtaccacacagctgggcttcccaccaggctttcccgcgggggtctcagggagcttctccccagcgctgctcggagtctgcaggaactggccttgttctccttagcccgtcactccatacagtattaggtgaggatggatgcgggcgctgtccttgccgggaagtcactgttgaagttgcagtggcttgttcacacctgtgggaagagaagtgaagactttctccttgcattaaaaagtctgaactgtgaaaaaaaaaaaaaaaaaaaaaaaaaaaaaaaaaaaaaaaaagaggttctagatcgcgagcggccgc

SEQ ID NO: 163 - DNA, 621 bp, Homo sapiens
  SITE (4): n equals a,t,g, or c
  SITE (8): n equals a,t,g, or c
  SITE (24): n equals a,t,g, or c
  SITE (60): n equals a,t,g, or c
  SITE (119): n equals a,t,g, or c
gagngggnagctcgggggaagggncctcgcagagaaacagaagaacatgggctgtggggnaccttcagcagcccggggttccaatcccagctcctccatgtgggagccaagcaccccangcagcctttcccagccttgcttagggccgggttgggagaatcccaccccgcagggctgtggtgagggttgaacggagggtgtgtggtgagggttgagcggagggtgtgtgatgcgtggtgagggttgagcaataagaaaccagaaccttgcagcctccagggcccraatgcgtttgcaggccagtggccactgtccgggctgtgatggcaccaaggcaggtggagcaccaggtaccacacagctgggcttcccaccaggctttcccgcgggggtctcagggagcttctccccagcgctgctsggagtctgcaggaactggccttgttctccttagcccgtcactccatacagtattaggtgaggatggatgcgggcgctgtccttgccgggaagtcactgttgaagttgcagtggcttgttcacacctgtgggaagagaagtgaagactttctccttgcattaaaaagtctgaactgagaaaaaaaaaaaaaaaaaactcga

SEQ ID NO: 164 - DNA, 601 bp, Homo sapiens
  SITE (592): n equals a,t,g, or c
ggagaacagstgacggtctttccataagtgcttctaagagagatgtgtggtaccccgggctaagtakacagcaactgagccctccctcccaccccagggytcccagagcaacagggagcagggagcataggacctggccgsagccaggaatctacactgaccggctcagcccatgaagtatcttgggctgaagtcacaggatgagactgtttgtatctgtaactgtccttgtcatctgtcttgcagatttagaagaggaatcagaaagctgggacaactctgagtctgaagaggaggagaaagcccctgtgttgccagagagtacagaagggcgggagctgacccagggcccggcagagtcctcctctctctcaggctgtgggagctggcagccccggaagctgccagtcttcaagtccctccggcacatgaggcaggtaggcggcaggggcacagcgcatcaggagctcaggaggagagccaatcatgggctgtccctgcccacacgccttgcctctggaccctccaccttcaaaaccctgcaggaagtgactgacagcctcctcggtgggtggctgagggcacagggcgntgggggtat

SEQ ID NO: 165 - DNA, 3337 bp, Homo sapiens
attatattagtcttggctcttttagaaactagtttgcttcatcactttgctggcttctcacagatttctaaaagcaattcccaggctattgtgggctatggtttgatgatattacttataatactgtggatacttagagaaattcaaagcatatatatcattggaattttccgaaatcccttttatccgaaggatgtgcaaactgtgactgtattctttgagaagcaaactaggctcatgaagattggtattgtcagacggattttgctaactttagtatcaccttttgccatgatagcatttctttcattggacagttccttacaagggctccactcagtgtctgtctgtattggattcacaagagcctttagaatggtwtggcagaatwcagaaaawgcyttattggagacmgtcattgtatcaacagtacacttgatctccagtacagacatatggtggaacagaagcctggatacaggactcagactcttactggttggtatccatacgtgatcgtttgattcagttcatctctaaattgcagtttgccgtgactgtgcttttgacatcatggacagagaaaaaacaacgtcgaaaaacaactgccactttatgtatactcaacattgtcttttctccattcgtgttggtcatcatagttttttctacactactctcttctcccttactccctcttttcacccttcctgtgttcttggtggggtttccccgacctattcagagttggccaggagcagcakgcaccacagcctgtgtgtgtgcagatacagtgtactactaccaaatggtgcccaggttgactgctgtactgcagactgcaatggcagctggaagtttaggtctcctcctacctggatctcattacttgggccgttttcaggatcgtttaatgtggataatgattctggaatgtggctatacttactgctctattaacattaaggggttagaattgcaggaaacatcctgtcatactgcagaagctcgcagagttgatgaagtttttgaagatgcttttgagcaagaatacacaagagtatgttcccttaatgaacactttggaaatgtcttgacaccctgtactgttttgcctgtgaaattgtattctgatgccaggaatgttctatcaggcataattgattctcatgaaaacttaaaagaatttaaaggtgacctcattaaagtacttgtgtggatacttgttcaatactgctccaaaaggcctggcatgaaagagaatgttcacaacactgaaaataaagggaaagcacctctaatgttgcctgctttgaacactttgccacctcccaaatccccagaagacatagacagtttaaattcagaaacttttaatgactggtctgatgataatatttttgatgatgagccaactatcaaaaaagtaatagaagaaaaacatcagttgaaagatttgccaggtacaaatttgtttattccaggatcagtagaatcacagagggttggtgatcattctacaggcactgttcctgaaaacgatctttacaaagcagttctattaggataccctgctgttgacaaaggaaaacaagaggacatgccatatattcctctcatggagttcagttgttcacattctcacttagtatgcttacccgcagagtggaggactagctgtatgcccagttccaaaatgaaggagatgagctcgttatttccagaagactggtaccaatttgttctaaggcagttggaatgttatcattcagaagagaaggcctcaaatgtactggaagaaattgccaaggacaaagttttaaaagacttttatgttcatacagtaatgacttgttattttagtttatttggaatagacaatatggctcctagtcctggtcatatattgagagtttacggtggtgttttgccttggtctgttgctttggactggctcacagaaaagccagaactgtttcaactagcactgaaagcattcaggtatactctgaaactaatgattgataaagcaagtttaggtccaatagaagactttagagaactgattaagtaccttgaagaatatgaacgtgactggtacattggtttggtatctgatgaaaagtggaaggaagcaattttacaagaaaagccatacttgttttctctggggtatgattctaatatgggaatttacactgggagagtgcttagccttcaagaattattgatccaagtgggaaagttaaatcctgaagctgttagaggtcagtgggccaatctttcatgggaattactttatgccacaaacgatgatgaagaacgttatagtatacaagctcatccactacttttaagaaatcttacggtacaagcagcagaacctcccctgggatatccgatttattcttcaaaacctctccacatacatttgtattagagctcattttgactgtaatgtcatcaaatgcaatgtttttattttttcatcctaaaaaagtaactgtgattcttgtaacttgaggacttctccacacccccattcagatgcctgagaacagctaagctccgtaaagttggttctcttagccatcttaatggttctaaaaaacagcaaaaacatctttatgtctaagataaaagaactatttggccaatatttgtgccctctggactttagtaggctttggtaaatgtgagaaaacttttgtagaattatcatataatgaattttgtaatgctttcttaaatgtgttataggtgaattgccatacaaagttaacagctatgtaatttttacatacttaagagataaacatatcagtgttctaagtagtgataatggatcctgttgaaggttaacataatgtgtatatatttgtttgaaatataatttatagtattttcaaatgtgctgatttattttgacatctaatatctgaatgtttttgtatcaagtagtttgttttcatagacttcaattcataaactttaaaaaacttttaataaaatattttccttccttttcaaatatccttctaatatatgtgaaaggagcggggttcacccattcatcatgtgaatattcacaggaagagcaatgttagggtaatatgcgtatgactactaaagcatatatctgactcattatgtatcgctttcaagtgaatttactgcttctgaaaaatgatttacccaacaggactaccagttactagtgtcttaaggtatatgaactaaagtcagaaggagatggaagaaaatttttataatacgatctgaattttattttcattctcttcttgcttaggaacgttttacagatacatgtaagggg

SEQ ID NO: 166 - DNA, 510 bp, Homo sapiens
  SITE (503): n equals a,t,g, or c
  SITE (504): n equals a,t,g, or c
  SITE (508): n equals a,t,g, or c
gattatattagtcttggctcttttagaaactagtttgcttcatcactttgctggcttctcacagatttctaaaagcaattcccaggctattgtgggctatggtttgatgatattacttataatactgtggatacttagagaaattcaaagcatatatatcattggaattttccgaaatcccttttatccgaaggatgtgcaaactgtgactgtattctttgagaagcaaactaggctcaygaagattggtattgtcagacggattttgctaactttagtatcaccttttgccatgatagcatttctttcattggacagttccttacaagggctccactcagtgtctgtctgtattggattcacaagagcctttagaatggtatggcagaatacagaaaatgctttattggagacagtcattgtatcaacagtacacttgatctccagtacagacatatggtggaacagaagcctggatacagggggaacccacttcgtgaacnncgtntc

SEQ ID NO: 167 - DNA, 1367 bp, Homo sapiens
  SITE (1339): n equals a,t,g, or c
gggcggctccgcggggccgggcgaggagtccagagagccatggccgccctgcgtgtcctgctgtcctgcgcccgcggcccgctgaggcccccggttcgctgtcccgcctggcgtcccttcgcctcgggtgctaactttgagtacatcatcgcagaaaaaagagggaagaataacaccgtggggttgatccaactgaaccgccccaaggccctcaatgcactttgcgatggcctgattgacgagctcaaccaggccctgaagatcttcgaggaggacccggccgtgggggccattgtcctcaccggcggggataaggcctttgcagctggagctgatatcaaggaaatgcagaacctgagtttccaggactgttactccagcaagttcttgaagcactgggaccacctcacccaggtcaagaagccagtcatcgctgctgtcaatggctatgcctttggcgggggctgtgagcttgccatgatgtgtgatatcatctatgccggtgagaaggcccagtttgcacagccggagatcttaataggaaccatcccaggtgcgggcggcacccagagactcacccgtgctgttgggaagtcgctggcgatggagatggtcctcaccggtgaccggatctcagcccaggacgccaagcaagcaggtcttgtcagcaagatttgtcctgttgagacactggtggaagaagccatccagtgtgcagaaaaaattgccagcaattctaaaattgtagtagcgatggccaaagaatcagtgaatgcagcttttgaaatgacattaacagaaggaagtaagttggagaagaaactcttttattcaacctttgccactgatgaccggaaagaagggatgaccgcgtttgtggaaaagagaaaggccaacttcaaagaccagtgagaaccagctgcccctgcttcacacctctgcttggagaggacaagtgcagcctgtcagttttagaagcaagtaaatcatcctcttttcaagagcagtgtccgtggtgtgcagttcctctccaattgctgcgtggtcgtggcccgacctctcacggcatgacagccttcgtcacccagcctgtgagggtcctgactggagcaccttctaaatctaagattctgctgaggagcccccgctggtccctctgggcatgctgtgctcggacggaaagcggggcctgtgggtccttgtgtccctgccgctgaagaatggggctgctctgagggaaacgctgtctcttcatacagatgctgattaaagtgatagcgattcagattaaaaaaaaaaaaaaaaaaaagggattcgaaatccaatttatggatacctngaccccaaggggggcccgtaacccattc

SEQ ID NO: 168 - DNA, 594 bp, Homo sapiens
gggaggaaaatggcggtcgctggagccgccgaccaagaggcttgggagtctgtacctttcccgaccgggccactggaagttggagcctccgccgagtcgcagacaacgcctccgggagggccttcctgatgcgcttgcctgctccctggtctctctgcatggggaaggagtgttcccagcttgcaaactccagctttgcctgtgagaggaacaagcgtccctgatccagaaggtgttcggatggagatggcgagttctgctggctcctggctctctggctgcctcatccctctcgtcttcctccggctgtctgtgcatgtgtcaggccacgcaggggatgccggcaagttccacgtggccctactagggggcacagccgagctgctctgccctctctccctctggcccgggacggtacccaaggakgtgaggtggctgcggtccccattcccgcagcgctcccaggctgttcacatattccgggatgggaaggaccaggatgaagatctgatgccggaatataaggggaggacggtgctagtgagagatgcccaagagggaagtgtcactctgcagatccttgacgtgcgcctt

SEQ ID NO: 169 - DNA, 684 bp, Homo sapiens
cggacgcgtgggtcgcccacgcgtccgtgtttccattagtgatactgatgtctcactgttgttctctccgagttgacttttctgtgcctttgtgcatgctcttatctcctctgcttggaatgtccttttcagcctgtcaaactccttcaaaatccagctcagatgttacattttctttaagcactcctgaccccaccccccaaatagacttagtccagccttcttctgggttcccacagcactcagtacagtttgaaaggtcctttataayagtcattattacatttttcaaaaataatttcatattcattaacctcattagattataagcacctcaattatgtagactgttttatcactgctgwcccagcacagcacctggcacagttagctgttcaagacatctctgttgagtgggtaaatgaatgagttccactccaggttcctgtgtttgkgacctccaggggcctcttctcttcccttccccttctcacgtaggctgatgccctggtcttccagctatgcactctacctgcctctcgawgctctaagccgatgtgtccatcatttggctgtttgcatattctgattcatgacattctcctgcacagtgctggctgacactctgtagcccatcatatctgacttctctggccagcctgtatgcctaccatcagctcgccc

SEQ ID NO: 170 - DNA, 1494 bp, Homo sapiens
  SITE (345): n equals a,t,g, or c
gaattcttcctggacttgatccttcccttcaggttccttctggcccagggtgtgtctaaaaatatcacccgggagttagagcctagaatggggacctcacgactctgcctgatgccttattcaactgtggctgagatggtatttatgttgcaaaacaaagtcctgtttatcctttcctctcctcttctcaaggagaaggatggaatctcttttggagctgggagccttcctgcctttgattgggggatgtgtgacacaagcgctcccttagccgcattggctggtgtctcactaggtcatgtacctccaagtccactggctctgagcccagcccagcactacaanttgcctaggagttacagtccttgtgamctagcctgccttttactgttatttaggaccccagagcactttagcctgtggtggcgaggcttgcagaaactccagttccaacctccaggctgtgtgattgtcctgtccctggggctggtctaaatgctccattcattggcattggctgagttctgccgggattggcagcactgcgttccggcttgtagtcccacagttgctgtgctctttccccgtgtgcagcgcagattcttcctctgtgccctgtggttgctacgagcgcatgggggagggctggggtcagcaattcaagactgtcttttctatcctcttcactgcctctttcagcaatatgaaggtactgtgattgctcacatgatttttggttcttatgaaggtgctttttgtgtaggtggttgtcagatttggtgttcctgcagggaggacaatcggtggaggcttctatttggccatattgctctgcctcccattccagcttgtttctatttttaatttttgttgcaatggagtskyytgcctggccctgaataatatttaaataaatcacaaggacttgaaactacaaaatgtatacttagagccaaagtcaccttacttgtaagaactggaaatggggataatgctctctatggttatgcagcctactcttttactaacctttctggactagatctttgaagtgcgtcttagctttcctcctttcctgaagagagcagagatagtgctgctttaactgtggtcatacatgtatgaggaataactttagtgtgagctgttggttttaaagagtcatatattattctatgcacttttgtaagttcattttataatgagcagattggtcaactgacatttttgattatttgtaatacatgtgttgcttggaataatactgttaatttccagaaatataagtgaaccttagcttttctgttggtggcttttaaactttttatgatgggaaaatgtgtgaattttctcctgggaaagtatagactggagacttagataccagtagatgaattgaggaatttctgtgtagcagtttaatatagaaaagagttagctgtccatgaggaagggctttaagaacaacaataactaccaaaaaaaaaaaaaaaa

SEQ ID NO: 171 - DNA, 610 bp, Homo sapiens
  SITE (602): n equals a,t,g, or c
gagaggagagactaaggacgctaggtgggcagggctcttcacttgcagcctcgaagcggaggatccctgtgtcccagccgggcatggccgacccccaccagcttttcgatgacacaagttcagcccagagccggggctatggggcccagcgggcacctggtggcctgagttatcctgcagcctctcccacgccccatgcagccttcctggctgacccggtgtccaacatggccatggcctatgggagcagcctggccgcgcagggcaaggagctggtggataagaacatcgaccgcttcatccccatcaccaagctcaagtattactttgctgtggacaccatgtatgtgggcagaaagctgggcctgctgttcttcccctacctacaccaggactgggaagtgcagtaccaacaggacaccccggtggccccccgctttgacgtcaatgccccggacctctacattccagcaatggctttcatcacctacgttttggtggctggcttgcgctggggacccaggataggttytccccagmcctcctggggctgcaagcgagctcagccctggctgctgaccctgaagtgctggcatctgctnagcttatt

SEQ ID NO: 172 - DNA, 654 bp, Homo sapiens
  SITE (594): n equals a,t,g, or c
aaggcattcatttcctcctacggtggatgcggacgccgggaggaggagagccccagagagaggagctgggagcggaggcgcagagaacacgtagcgactccgaagatcagccccaatgaacatgtcagtgttgactttacaagaatatgaattcgaaaagcagttcaacgagaatgaagccatccaatggatgcaggaaaactggaagaaatctttcctgttttctgctctgtatgctgcctttatattcggtggtcggcacctaatgaataaacgagcaaagtttgaactgaggaagccattagtgctctggtctctgacccttgcagtcttcagtatattcggtgctcttcgaactggtgcttatatggtgtacattttgatgaccaaaggcctgaagcagtcagtttgtgaccagkgtttttacaatggacctgtcagcaaattctgggcttatgcatttgtgctaagcaaagcacccgaactaggagatacaatattcattattctgaggaagcagaagctgatcttcctgcactggtatcaccacatcactgtgctcctgtactcttggtactcctacaaagacatggnttgccggggaggttggttcatgactatgaactatggcgtgcacgccgtgatgtactctta

SEQ ID NO: 173 - DNA, 2046 bp, Homo sapiens
  SITE (33): n equals a,t,g, or c
  SITE (96): n equals a,t,g, or c
  SITE (100): n equals a,t,g, or c
  SITE (113): n equals a,t,g, or c
  SITE (122): n equals a,t,g, or c
  SITE (131): n equals a,t,g, or c
  SITE (1986): n equals a,t,g, or c
  SITE (1993): n equals a,t,g, or c
  SITE (2019): n equals a,t,g, or c
cctggtattcaggactgaattggaagtctgagnatcagtgtggagccatatctcggctggcaaagccggattgtccgtctgattatctcaatgtcnagtncccacctgctcgntgtgatcancactaacanggaacaaattcaaggacaacctgtytttgagccaggcagcctcagacacctgcctgtggcccckcctccacttctcctgcccggatgccagtgctccgagctcagacagaggaagccctgcagaaagttccatcaggctgtttcctaaaggatgtgtgaacgggagatgatgcactgtgttttgaaagttgtcattttaaagcattttagcacagttcatagtccacagttgatgcagcatcctgagattttaaatcctgaagtgtgggtggcgcacacaccaagtagggagctagtcaggcagtttgcttaaggaacttttgttctctgtctcttttccttaaaattgggggtaaggagggaaggaagagggaaagagatgactaactaaaatcatttttacagcaaaaactgctcaaagccatttaaattatatcctcattttaaaagtkacatttgcaaatatttctccctatgataatgtagtcgatagtgtgcactctttctctctctctctctctctcacacacacacacacacacacacacacacacacacasacacggcaccattctgcctggggcactggaacacattcctgggggtcaccgatggtcagagtcactagragttacctgagtatctctgggaggcctcatgtctcctgtgggctttttaccaccactgtgcaggagaacagacagaggaaatgtgtctccctccaaggccccaaagcctcagagaargggtgtttctggttttgccttagcaatgcatcggtctctgaggtgacactctggagcggttgaagggccacaaggtgcagggttaatactcttgccagttttgaaatatagatgctatggttcagattgtttttaatagaaaactaaaggggcaggggaagtgaaaggaaagatggaggttttgtgcggctcgatggggcatttggaacttctttttaaagtcatctcatggtctccagttttcagttggaactctggtgtttaacacttaagggagacaaaggctgtgtccatttggcaaaacttccttggccacgagactctaggtgatgtgtgaagctgggcagtctgtggtgtggagagcagccatctgtctggccattcagaggattctaaagacatggctggatgcgctgctgaccaacatcagcacttaaataaatgcaaatgcaacatttctccctctgggccttgaaaatccttgcccttatcatttggggtgaaggagacatttctgtccttggcttcccacagccccaacgcagtctgtgtatgattcctgggatccaacgagccctcctattttcacagtgttctgattgctctcacagcccaggcccatcgtctgttctctgaatgcagccctgttctcaacaacagggaggtcatggaacccctctgtggaacccacaaggggagaaatgggtgataaagaatccagttcctcaaaaccttccctggcaggctgggtccctctcctgctgggtggtgctttctcttgcacaccactcccaccacggggggagagccagcaacccaaccagacagctcaggttgtgcatctgatggaaaccactgggctcaaacacgtgctttattctcctgtttatttttgctgttactttgaagcatggaaattcttgtttgggggatcttggggctacagtagtgggtaaacaaatgcccaccggccaagaggccattaacaaatcgtccttgtcctgaggggccccagcttgctcgggcgtggcacagtggggaaatccaagggtcacagtatgggrgaraggttgcaccctgccaccctgctaactttcctccgcttaaanacagtgnttttcctgccccagggttaaacctgntttcccaccaagcaaaaaacaagccca

SEQ ID NO: 174 - DNA, 1439 bp, Homo sapiens
  SITE (37): n equals a,t,g, or c
  SITE (61): n equals a,t,g, or c
  SITE (73): n equals a,t,g, or c
cctaaacgtccaacgtcaatgcccaaaaccaccagangccaacacacctacgtgtaaacanctacgacgttangtttggggtaaatgtggggaatgaaactgccatgaaggcccctgaattaaaggatgtggggaagtgggctgcggtccactgtccggccttgcaaggccmccyggaggcctgtctgttagccagtggtggaggagcaaggcttcaggaagggccagccacatgccatcttccctgcgatcaggcaaaaaagtggaattaaaaagtcaaacctttatatgcatgtgttatgtccattttgcaggatgaactgagtttaaaagaatttttttttctcttcaagttgctttgtcttttccatcctcatcacaagcccttgtttgagtgtcttatccctgagcaatctttcgatggatggagatgatcattaggtacttttgtttcaacctttattcctgtaaatatttctgtgaaaactaggagaacagagatgagatttgacaaaaaaaaattgaattaaaaataacacagtctttttaaaactaacataggaaagcctttcctattatttctcttcttagcttctccattgtctaaatcaggaaaacaggaaaacacagctttctagcagctgcaaaatggtttaatgccccctacatatttccatcaccttgaacaatagctttagcttgggaatctgagatatgatcccagaaaacatctgtctctacttcggctgcaaaacccatggtttaaatctatatggtttgtgcattttctcaactaaaaatagagatgataatccgaattctccatatattcactaatcaaagacactattttcatactagattcctgagacaaatactcactgaagggcttgtttaaaaataaattgtgttttggtctgttcttgtagataatgcccttctattttaggtagaagctctggaatccctttattgtgctgttgctcttatctgcaaggtggcaagcagttcttttcagcagattttgcccactattcctctgagctgaagttctttgcatagatttggcttaagcttgaattagatccctgcaaaggcttgctctgtgatgtcagatgtaattgtaaatgtcagtaatcacttcatgaacgctaaatgagaatgtaagtatttttaaatgtgtgtatttcaaatttgtttgactaattctggaattacaagatttctatgcaggatttaccttcatcctgtgcatgtttcccaaactgtgaggagggaaggctcagagatcgagcttctcctctgagttctaacaaaatggtgctttgagggtcagcctttaggaaggtgcagctttgttgtcctttgagctttctgttatgtgcctatcctaataaactcttaaacacaaaaaaaaaaaaaaaaaaaaaaaaaaaaaa

SEQ ID NO: 175 - DNA, 675 bp, Homo sapiens
gattagatggcgctagatatttcacttttttatttgktttatttttttttttttttgagatggaatttctctcttattgcccaggctggagtgcagtggcacgatcttggctcacctcaacctccgcctcccgggttgaagcgattctccttcctcggcctcccgagcagctgggattacaggcatgcgccaccatgcccggctaattttgtatttttagtagagatggggtttctccatgttggtcaggctggtcttgaactccctacctcaggtggtccacctgcctgggcctcccaaagtgctgggattacaggcgtcagccaccgtgcctggcctgagaattcacatttttaacaatttcccaggggatgttagtgcagcctgtctggggaccatggttcgagaaccatagctctagatttttctaagagcatttctgtctccatgccagacctgttttcctccatgaagtatactatttcaatgctcgacttagtgtttatgttttactctttctactgtttttacaatcttaatccagcctataaattcctctgggcagaaattataccttccacactctttcattttctgttttggaaaataatgagtacatcttcagcatgattaataatagaatggagaaaggggaaaacctcagactatcaaccc

SEQ ID NO: 176 - DNA, 8446 bp, Homo sapiens
  SITE (2333): n equals a,t,g, or c
  SITE (3087): n equals a,t,g, or c
  SITE (4356): n equals a,t,g, or c
  SITE (6401): n equals a,t,g, or c
agattggtttcgtttcgccgactgctgaatttaccccgaaaaccgtcgaaacgccggatctgcgtaccgacctcgtctatcgcctgcgtattgtggtgaccgacgccgatgatgcgttacgccagggaatgccagtgacggtacaattcggtgacgaggcaggacatgaatgatgccgttatcacgctgaacggcctggaaaaacgctttccgggcatggacaagcccgccgtcgcgccgctcgattgtaccattcacgccggttatgtgacggggttggtggggccggacggtgcaggtaaaaccacgctgatgcggatgttggcgggattactgaaacccgacagcggcagtgccacggtgattggctttgatccgatcaaaaacgacggcgcgctgcacgccgtgctcggttatatgccgcagaaatttggtctgtatgaagatctcacggtgatggagaacctcaatctgtacgcggatttgcgcagcgtcaccggcgaggcacgtaagcaaacttttgctcgcctgctggagtttacgtctcttgggccgtttaccggacgcctggcgggcaagctctccggtgggatgaaacaaaaactcggtctggcctgtaccctggtgggcgaaccgaaagtgttgctgctcgatgaacccggcgtcggcgttgaccctatctcacggcgcgaactgtggcagatggtgcatgagctggcgggcgaagggatgttaatcctctggagtacctcgtatctcgacgaagccgagcagtgccgtgacgtgttactgatgaacgaaggcgagttgctgtatcagggagaaccaaaagccctgacacaaaccatggccggacgcagctttctgatgaccagtccacacgagggcaaccgcaaactgttgcaacgcgccttgaaactgccgcaggtcagcgacggcatgattcaggggaaatcggtacgtctgatcctcaaaaaagaggccacaccagacgatattcgccatgccgacgggatgccggaaatcaacatcaacgaaactacgccgcgttttgaagatgcgtttattgatttgctgggcggtgccggaacctcggaatcgccgctgggcgcaatattacatacggtagaaggcacacccggcgagacggtgatcgaagcgaaagaactgaccaagaaatttggggattttgccgccaccgatcacgtcaactttgccgttaaacgtggggagatttttggtttgctggggccaaacggcgcgggtaaatcgaccacctttaagatgatgtgcggtttgctggtgccgacttccggccaggcgctggtgctggggatggatctgaaagagagttccggtaaagcgcgccagcatctcggctatatggcgcaaaaattttcgctctacggtaacctgacggtcgaacagaatttacgctttttctctggtgtgtatggcttacgcggtcgggcgcagaacgaaaaaatctcccgcatgagcgaggcgttcggcctgaaaagtatcgcctcccacgccaccgatgaactgccattaggttttaaacagcggctggcgctggcctgttcgctgatgcatgaaccggacattctgtttctcgacgaaccgacttccggcgttgaccccctcacccgccgtgaattttggctgcacatcaacagcatggtagagaaaggcgtcacggtgatggtcaccacccactttatggatgaagcggaatattgcgaccgcatcggcctggtgtaccgcgggaaattaatcgccagcggcacgccggacgatttgaaagcacagtcggctaacgatgagcaacccgatcccaccatggagcaagcctttattcagttgatccacgactgggataaggagcatagcaatgagtaacccgatcctgtcctggcgtcgcgtacgggcgctgtgcgttaaagagacgcggcagatcgttcgcgatccgagtagctggctgattgcggtagtgatcccgctgctactgctgtttatttttggttacggcattaacctcgactccagcaagctgcgggtcgggattttactggaacagcgtagcgaagcggcgctggatttcacccacaccatgaccggttcgccctacatcgacgccaccatcagcgataaccgtcaggaactgatcgccaaaatgcaggcggggaaaattcgcggtctggtggttattccggtggattttgcggaacagatggagcgcgccaacgccaccgcaccgattcaggtgatcaccgacggcagtgagccgaataccgctaactttgtacaggggtatgtcgaagggatctggncagatctggcaaatgcagcgagcggaggacaacgggcagacttttgaaccgcttattgatgtacaaacccgctactggtttaacccggcggcgattagccagcacttcattatccccggtgcggtgaccattatcatgacggtcatcggcgcgattctcacctcgctggtggtggcgcgagaatgggaacgcggcaccatggaggctctgctctctacggagattacccgcacggaactgctgctgtgtaagctgatcccttattactttctcgggatgctggcgatgttgctgtgtatgctggtgtcagtgtttattctcggcgtgccgtatcgcgggtcgctgctgattctgttttttatctccagcctgtttttactcagtaccctggggatggggctgctgatttccacgattacccgcaaccagttcaatgccgctcaggtcgccctgaacgccgcttttctgccgtcgattatgctttccggctttatttttcagatcgacagtatgcccgcggtgatccgcgcggtgacgtacattattcccgctcgttatttcgtcagcaccctgcaaagcctgttcctcgccgggaatattccagtggtgctggtggtaaacgtgctgtttttgatcgcttcggcggtgatgtttatcggcctgacgtggctgaaaaccaaacgtcggctggattagggagaagagcatgtttcatcgcttatggacgttaatccgcaaagagttgcagtcgttntgcgcgaaccgmaaacccgcgcgattctgattttacccgtgctaattcaggtgatcctgttcccgttcgccgccacgctggaagtgactaacgccaccatcgccatctacgatgaagataacggcgagcattcggtggagctgacccaacgttttgcccgcgccagcgcctttactcatgtgctgctgctgaaaagcccacaggagatccgcccaaccatcgacacacaaaaggcgttactactggtgcgtttcccggctgacttctcgcgcaaactggataccttccagaccgcgcctttgcagttgatcctcgacgggcgtaactccaacagtgcgcaaattgccgccaactacctgcaacagatcgtcaaaaattatcagcaggagctgctggaaggaaaaccgaaacctaacaacagcgagctggtggtacgcaactggtataacccgaatctcgactacaaatggtttgtggtgccgtcactgatcgccatgatcaccactatcggcgtaatgatcgtcacttcactttccgtcgcccgcgaacgtgaacaaggtacgctcgatcagctactggtttcgccgctcaccacctggcagatcttcatcggcaaagccgtaccggcgttaattgtcgccaccttccaggccaccattgtgctggcgattggtatctgggcgtatcaaatccccttcgccggatcsctggcgctgttctactttacgatggtgatttatggtttatcgctggtgggattcggtctgttgatttcatcactctgttcaacacaacagcaggcgtttatcggcgtgtttgtctttatgatgcccgccattctcctttccggttacgtttctccggtggaaaacatgccggtatggctgcaaaacctgacgtggattaaccctattcgccactttacggacattaccaagcagatttatttgaaggatgcgagtctggatattgtgtggaatagtttgtggccgctactggtgataacggccacgacagggtcagcggcgtacgcgatgtttagacgtaaggtgatgtaacttcttatctttcgccagcaaagacactaccgccgggccggcaaggattgccagccctgcaattgccagcaaaaagttgttttccagaacgcgggacaacagccacagcacaatcagcgtgcgccaaaataccaggtcgtggtcagctcttccagcacgtctgccacctcacgccagcgttgctcggggtggcgctgaaacaccagcatcnatcactaccgtgacacaatacagtgcgcataatcccacgccgacgtgaaccagagtcttactcatccagcccaccaccagcagcgccactaccagtaaatgcaacataatctgccagcaacttagacccgttgcgacacgaacacgttgttgccacttcatggcttctctcctgaagaatttatctctacttactcagagtaccgaactttacggaaaattccgtaagaccgcacctttttgtgacgccgactacactatttcaatgagataagaggcaaagacaggaaaattatgcccgatcaaacacaacaattttcgttcaaggtgctcaccatcaatattcacaaaggctttaccgcgtttaaccgacgcttcattttgccggaacttcgcgacgccgtgcgtaccgtcagcgccgatattgtttgcctgcaggaagtgatgggcgcgcacgaagttcatccgctgcatgtggaaaactggcccgatacctcgcactacgagtttctcgccgacactatgtggagcgattttgcctacggtcgcaatgccgtatacccggaagggcatcacggcaacgccgtactgtcgcgttatcccattgaacattatgagaatcgcgatgtttcggtcgatggtgcggaaaagcgcggcgtgctctactgccgcattgtgccgccgatgaccggaaaagcgattcatgtgatgtgcgtacatctgggcctgcgtgaggcgcaccgtcaggcgcagcttgcgatgctcgccgaatgggtgaatgagctaccggacggcgaaccggtattggtggcgggtgatttcaatgactggcggcaaaaagctaatcatccgttaaaagtgcaggccggactggatgagatttttacccgcgcccacggacgcccggcgcgcacgtttccggtgcaatttcctctactacgactggacaggatctacgtcaaaaatgccagcgccagcgcgccaaccgcgttgccgctgcggacatggcgacacctttctgatcatgcccctttaagtgcggagattcatttatgaaatgtagctggcgcgaaggcaataagatccagttgctggaaaacggcgagcaatattatcccgcggtgtttaaggcgattggcgaggcacaagaacgcatcattcttgaaacgtttatctggtttgaggatgacgtcggcaaacaactgcatgcggcactactggcagcagcgcaacgcggggttaaagcggaagtcttgctggatggctacggttcgccggatctcagcgatgagtttgtcaatgaactgacggcagctggcgtagtgttccgctactacgatccccgccctcgcctttttggtatgcgcaccaatgtgtttcgccggatgcatcgcaaaattgtggtgatcgacgcgcgtatagcctttattggcgggctgaattactccgccgagcatatgtccagctacggtccagaggctaaacaggattacgcggtacgccttgaagggccgattgtcgaagatattctccagtttgagctggaaaacctgcctggacagagcgcggcacgacgctggtggcgacgtcatcacaaagcggaagagaaccgccagccgggagaagcgcaggtattgctggtctggcgcgataacgaagaacatcgcgatgatattgaacgccattatttgaaaatgctcactcaggcgcggcgggaagtgattatcgccaacgcctacttcttccccggctatcgatttttacacgccttgcgtaaagcggcacggcgcggggtgcggatcaaactgatcattcagggcgaaccggatatgccgattgtcagagtcggtgcgcgcttgctgtataactatctggttaaaggcggcgttcaggtttttgagtaccgccgccgcccgctccacggcaaagtggcattgatggacgatcactgggcgacagtagggtccagtaatctcgatccgctcagtttgtcactgaatctcgaagcaaatgtcatcatccacgatcgtcattttaaccagacgntgcgcgataatctgaacggcattattgccgcagattgtcagcaggtggatgaaaccatgctgcccaaacgcacctggtggaacctgaccaaaagcgtgctggcgttccactttttacgccacttcccggcgctggttggctggcttccggcacacacgccacgtctggcgcaggttgatccgcccgcacaaccgacaatggaaacgcaggatcgggtagaaactgaaaacacgggggtaaaaccctgatgagtaaatcacacccgcgctggcgcttagcaaagaagatcctcacctggctgttttttatcgcggtgattgtgttgctggtggtctacgccaaaaaagtggactgggaagaggtctggaaggtcatccgcgactacaatcgcgttgcgctgcttagtgcggtcgggctggtggtcgtcagctatctgatttacggctgctatgacctgctcgcccgcttttactgcggtcacaaactggcgaagcgccaggtgatgctggtgtcgtttatctgctacgccttcaacctgacgctcagtacctgggtcggcggcattggtatgcgctatcgtttgtactctcgtctggggttgcccggtagcactattacgcggattttctcgctcagtattaccaccaactggctgggctacattttactggcagggattatctttaccgcaggcgtggtggagttgccggatcactggtatgtcgatcaaactacgctgcgtattctcggcattggcttactgatgattatcgcggtttatttgtggttttgcgctttcgcgaagcaccgccatatgaccatcaaagggcaaaagctggtgctgccttcatggaaattcgccctcgctcagatgctgatttccagcgttaactggatggtaatgggggcgattatctggctgttacttggtcaaagcgtgaactatttctttgtactgggcgtgttactggttagtagtattgctggcgtcatcgtgcatattccggcggggatcggtgtgctggaagcggtgtttatcgcactactggctggggagcatacctccaaaggtacaattatcgccgccctactcgcttaccgtgtgctgtattactttatcccactgctgctggcgctgatctgttacctgttgctggaaagccaggcgaagaagctacgggcgaaaaatgaagcggcgatgtgaagtttagttaagttctttagtatgtgcatttacggctaatgaaaaaaacgcgtatgcctttgccagacaagcgttatagctatcgcggcaagtatcccaaagaagccgataaaatagtaatagagtgttaatgcacctgtaaaagcgcaacgaaccggactccacaactcttcactatggcatttccccgccaattcaaggagcttatttcgtccatgcgagataatgcctgaccataacacaatcattaagcaacttattatccaaatgggccgttcactcattaatgccgcattcacgatgattaccagggccaaccctgtcaacgtcatcataatgataaaacggtgagaaccaggatcaacattaaataataaaccggccagcatactgattaaaaacatcgcgcccgcagtgctgaacacgatgataatggcatatacaggaactaaacttgcaacgacaatcgccaccaaagagagtaaaaacagatatattacgcccgcgatggcggcatttatcttgktgatatccttacttaagccatacatacaaagtaataataaccctatggcgacatacattggtggtgaatcatatttggttgccgtaatttcgatatacttagctccccaggctagtcctgcggttgccaccaaacctaaagcggtaatgagccatataccgtttaatatcctggcctcgtgctgaaaatctaatttattgctgttttgcgatatgattccattcttttagttttccttagaaaaaatattaatattcaccaycaataawtttaaaaccacgcatacaaaatacttttgcatttatggatacagaa

SEQ ID NO: 177 - DNA, 730 bp, Homo sapiens
cgcagacctgcgcacagccaaggaggtccagacgatcgaggtctataagcacgaggagtgctcgaggccccacaatgggcgctggattggatgtttggcaactgattccgactggatggtgagctgggcagactgtgggatgggatggcagctccgggccctgtcagctgtgggcctgtggttcacagctggggactcccacctttctgtccaggtctgtggagggggcccagccctcaccctctggcacctccgatcctccacacccaccaccatcttccccatccgggcgccacagaagcacgtcaccttctaccaggacctggtgaggccctgtgtctcacttctgccacccccactgactcttcccttcagtcctgacccctgagcaccttccctgtcctctgcagattctgtcagctggccagggccgctgcgtcaaccagtggcagctgagcggggagctgaaggcccaggtgcctggctcctccccagggctgctcagcctcagcctcaaccagcagcctgccgcgcctgagtgcaaggtgggtccggcaggggccgcggagcggctgggaggcaggggtgtgggcaggccagtcatgcccctctttcctccaggtcctgacagctgcaggcaacagctgccgggtggatgtcttcaccaacctgggttaccgagccttctccctgtccttctgatctctgacgacacccccagccagctcag

SEQ ID NO: 178 - DNA, 621 bp, Homo sapiens
ggcagcattgaactcctgggctcagatgatctttccacctcagcctcccaagtagttgggactttaggcatgctctgccacgcctggctattattgatgtatttatttttagagatgaggtctcactgtgttgcccagactggtctcgaactcttggcctcaagccatcctcctttctcagcctctacagtagctgggatttcaggtacatgccactgtgccctgcttattccctttaaaatacggtaaccacagggaaggagggattcttccctgctaatatttgtctgtccagtctctggcgctgagcttggtgcatgaaacccctaacatttattaggcattgtggaaagtacttcccgtgtattgtctcagaaacaacacagtgtcccgacaaaaacttgagagtcaagtggcccacagcgggcaagttgcttattttctcttaggtttctcatctgtaaagtgggaataatattagtacccccttgtaggatgattataatgtcttgtggctacaagccaaggaatgccaggaattcctggaagccaatagatgtcctatccctgctcggaagctagaagaggcaagaaagaattcttcattaggacctttggaga

SEQ ID NO: 179 - DNA, 558 bp, Homo sapiens
  SITE (133): n equals a,t,g, or c
  SITE (395): n equals a,t,g, or c
  SITE (408): n equals a,t,g, or c
  SITE (409): n equals a,t,g, or c
gctgcctcattttgtgatgccactatatcaacctatggcttccaagatatctgtgacaaattaaaaaagagcatgatgtgtatcatgtgtgctaatagctgtgggcctgaatggatcacatggcatcagattnactggaaaggttgctggtagctatggtcttcccttgtgcccaggaagtggaaaatgaaataggatttggggaacatttagctttggctcggtcacagcctccagactttaaagccacgtttttaaagccaaaggtagttgtgggccaggtgtggtggctcatgtgcgtaatcccagcactttgggagactgaaagggtggatcacctgaggtcaagagctcaagaccagcctgcccaatgtggcaaaaccccgtctctactnaaaatacaaacannaaattagccggctgtggtggcgtatgcttgtagttccagctacttgggaggctgaggcaggagaatttcttgaacccgggaggcgagtgagccgagatggcaccactgcactccaacctgggtgacagagcaagactctgtctcaaaaa

SEQ ID NO: 180 - DNA, 1513 bp, Homo sapiens
  SITE (1481): n equals a,t,g, or c
  SITE (1513): n equals a,t,g, or c
gctccatctaggacaagtcaggatcgagatccaagttctctctccacctcagaaacaacggtggcaccttcattggggagtactgaatttcagccacttgtgcagtcaacaacacttctacctgaagcctcccatgaccagtttgtggctcaaggtcaccaggaaagtacatcaccacggccacctcatgattcatctctttctgctcccctgcccaaactgtgtgtttttgttactccatctcttctttcagcaatgtgcagcctcttggacaacctcttgacgattgctcccagagacactgcaaaggcttttcgacaagctcatctcatagaacttctctgtagcattgcagatgctaccctcatacagacatgtgtccaggaactcagagccctgctgccttcatcacctccagctgaacacactcaggctcaggtttcctttctcctggaatacctatcctctttgtccaggcttctgcagtcatgtttattggtggagcctgaccttgtgattcaggatgagcttgtgaaacctcttatcaccaatatcattggaattctcaccatatgtaccaaagatgtattagataaagagttaatatcagctttttatcacacatggacacatttatttaatcttctggccatgctcctgaggaaagctggtgccatcacactcccgtytgttaccgtggccctggcaagcactggacagcggcgattgatatgttctgcacatgtgcrggcttgtctgccacgtgtcctgccctgtwtactgccagcttgcaattcctttctgttctcttgaccgaagaagcaaaagggcatctycaggctaagagcaaaacacatttwtgctgtagtccaacagtggcttcacttcttgatgactctcaggaaaatcagaaatctctagaacaacttagtgatgtaatccttcagtgctatgaagggaaatcctccaaagatatcctgaaaagagtagctgcaaatgcattgatgtcactgctggctgtcagtagaagagcacagaaacatgctttgaaagccaatcttatagacaattgcatggagcagatgaaacacataaatgcacaactgaacctagattctctgaggcctgggaaagcagcattraaaaaaaaggaggatggtgttattaaagagttaagcattgccatgcagctcctaagaaactgtstttatcaaaatgaggaatgtaaagaagcagctcttgaagctcaccttgtccctgtcttgcactctctctggccttggattttgatggatgattcattgatgcaaatttctctgcagctcctttgtgtctatactgcaaattttccmaatggttgcagttctctttgttggtcaagttgtggacaacaccckgttcaagctacacatagaggagccgtgagcaactctctggatgctgtgtgatcctaaaagttgggtttcccagatgccactggnggaacaccacggtttcagcagatggttttttn

SEQ ID NO: 181 - DNA, 777 bp, Homo sapiens
  SITE (35): n equals a,t,g, or c
  SITE (155): n equals a,t,g, or c
gcaacaaatgattctgaggcttgatggctgtctanacttactaacagagatgagcaaatacaagcacaagagcagccctttattgcctcttcttatctttcataatgtttgcttcagtcctgcaaataaacccaagatcctggctaatgaaaaangtcattactgtgcttgctgcctgtctggaaagtgagaatcaaaatgctcagaggattggagcagctgccctttgggctctgatttacaattatcagaaggcaaaaacagctttgaaaagcccatcagtaaaaagaagagtggatgaagcatactccttagcaaagaaaactttcccaaactcagaagcaaaccctctaaatgcctattatttgaaatgtcttgaaaacctcgtgcagctccttaattcttcctgagtgccatgggatgctacaccttgaagctgacagtcatcaacaggggagctaaagttgaagccagctgtgtgtagcagctgttacctgaagacgtgctacctctctacaaagtgttgatccccttctttcccatgagagagagaactggtgatactccaacaccgtccagttgtggcagctctccagaagtaatagcagctgacaactttctgtgccttttcctttctgttgaaaaggcatagaaagttctgggaacataaacatttttacccttttctatgccatttattttgtaaaaatcctatttaacagttatttaataaaacaatatttttagaaactaaaaaaaaaaaaaaaskgcggccgc

SEQ ID NO: 182 - DNA, 1909 bp, Homo sapiens
  SITE (1902): n equals a,t,g, or c
gaaaatatattagaaaaaaaaaaaaaacaatttgaagccaaatgaacaaaactccagataccattgataagaaattttgcatcaagaagggcttctgaaaagacccacgtgctccagtcccagctccaaaagccactgatgacaagggccccactgtggaacctaagtctgggagccccctgacttctggctggccagaggctgcggtccgtcaagggcttgcctcgcttcagaatcagtaacatagatcttaagtgcaattgattaataagcagtgagttactgtagcttcctttagctctaccgaactctttttaaaaactcaaacttgagcagccttagaaaaggggttggggggtgggaaccacaggccatttctctaagtgggctgctgtgaagttttaaatgaaagctctagctttaggagcttgagccatttcctgactgcactggcctggcagtctggctgctgcasaagagtttttaaagaggggtcsgagcccgcccgtgagagcggktcttctcaccatgtggggctgtactacgtggtggtcttggtttctcttcacagaaatgctctctcaccaacttgccccactgtcccaactcctctcctcttagagaaaaaactgtgattacctcaacttgaatatgaaactgtgattgaaaaaagtcaaaacgtgaagaagcatcaaagccaaaaaggcaaaactggctgaggcctctgttgatgctcctcagcctactcgggaacgtgaaggggcagctggcgaaagggcattcctggggccacttgctctgccccactgataaggcacacccgcggtgcactgtgagctctttgaggactgaggccaggggatgcctcctggaacctgccaggcctctctgttctgtgaaggtcagtatccacttgattcctccaggcggcgctccaggtgggaggagcagggtcttctgctgtttccaaaggaatggccatgacactgcttttgaccttagaagtggatccagggacccagcaaagagcgggggtgggttcccagggacaggcagtcctcccggggcttacatgctttttgctaactttcctattagcagcttcagtttatatcacccagagtgcgtgggataatgttgaagtcgctgaagttacgggttattttatgtttttacatgggatttttctgtttttgattggaagaaggagacagaaattggaggaaatgggattattatcctagggaagggccgttggcaaggagttgagccggcccctctgagccctgggggctatctgacctgaagcctggacactgggcccttcaggtcgcaagaaaaagttccctcctaaattctattaggattttggagaatttttgcacagtaagaagctctgggttgctccttgggcttctcaaaagggaaaagttcaattcaaagattgtaaactacgaagtattccagccgtgttgctgatctagttggatagttgtacctcaaaaaagtaggtgagaactggcttcctcattgtcccaggatgtcaaatactaatgacataagagctcacttacgtgccaaaattcacttttatactagtttttcagtgctttaatatttgtaacttaaattttaaaactcgtatttacaaacactactgtaacttcagtgaaactgaattgtgcgattgaagctttttgcttatcatagtatttattacactacttaattcagtaaatatataaaagtagccttcaatttatttttatattattttacatgtttttacctgcagttgtgtatgtgaatttaccttggtaatcgagatgtcatgctaaggaccaataaactatcactgaacaaaaaaaaaaaaaaaaaaaaaaaaaaaaaaaaaaaaaaaanaaaaaaa

SEQ ID NO: 183 - DNA, 773 bp, Homo sapiens
  SITE (47): n equals a,t,g, or c
  SITE (62): n equals a,t,g, or c
actatccaccagatagatagctcactctgaaaatttgaggttcattnaccaatccttttttnccttcattccccatatgcaaattagcagcaatcccacaattctaaaatacatcctgaaatcggaaccctctatcactactattaaatccacaatttaaatcaccatcatctcttatctggattctttcagttacctcctgattaattccctgcttcttgtgttgctttccacagatcactgcctgcatagcaaacagaatgatttcctaaaaaaaaaaaattgagactgtattgttcccttgcttaaagccctccaacagcttcccattgcaataaaaataaatgtcaccttcttatttggcctataaggcctgacgtggtttggctcctgcctctgtaaactcatcatctaccccttgtccccaggttctcatgctccagccacagtggctaccttcctgtcccgcgaatgtacccagtatatactacctcagacttttgctctggaacattcgttctcatttttgcatggctaaccctttctgaattagtcagggttctccatagaaagataatcaattggttttttatatttttaaggagattttattatggagaattagcatatgcaaatatggagaccacaatgtgccatctacaagctggagacccaagacagctggtggtgtaattcartctgagtccgaaggctgagagccagaggaactgatggtgtgaatcccagtctgaaggcaagggaagatgaaatga

SEQ ID NO: 184 - DNA, 614 bp, Homo sapiens
gcggcacgagtgaacatccatgtactcaccatctctttaccttcttccctccctcccctccctcctccagttgagtctctccagaagcccccgattcaacaaggggttacaaagagccatggagaagacaatgaagggttctacaattaagattttgctctattttttccatcatatctatgcatctctccatacctttattcctctacccaatccatctatttttttatgcatttcaaagtacattgcagacattagtacatgacacctctaatcagttttatgttcctttcctttttactttatacgaaataaaaatcacagttaacaattatcaagtgcttactgtcaggcactgtgccaagcactttccttgcattacataatttgaatctcatggtaaccctataagtacagttaccaccttcattttacaaatgagaagaactgaaacagagaacaatggtgtcaattaacattttaaaagtctttctatgggccattcacagtgcaagtacttttcatgcattawctcagttaatcccttatagcaatttcataaaggcaatactattacmgatgcaaaattgagactttkagaaaaagatcttgga

SEQ ID NO: 185 - DNA, 437 bp, Homo sapiens
ctagttctagatcgcgagcgccgcccttttttttttttttttttttttttttttttttttttacmtctttgkcaaagggtaaaaaagcatatatgaaattaaaaatagtatcaaagaattcaactacaaagggcttaacaaacttcgtaaattggagatatataggacattgtacctaacctaatagaaacttaaacattttttagttatgkatgkcagtttttaaccatgttccatagaggaatgttaacaatgtctaaaaaatcagkgtcatacaaaatacgttatttcagccaggcatggcagctcatgccggtaatcctagtgctttgggaggctgaggcaggaggatcacttgaagccaggcaagaccatatagkgagactytgtctctgcaaaaaaaaaaaaagggcggcsccccttttttttttttttta

SEQ ID NO: 186 - DNA, 587 bp, Homo sapiens
  SITE (534): n equals a,t,g, or c
gacatccattgaagctgcaacaccaccccccgccacttcacctccttcctgacatgctctgctcctcctttctccccctcagcactgctgccatctgggctgcattattctcgggtatgggggctgtccgacattccccatcagaaggaaaaagatccctgaaaagtagcaggtgcttacatttctggcctctacccaccggctgcagtagtcccccaccaccctgcaatgtgacaaccaaaaatgtctctagatgttgccagaagtcctctagagatgggagggtacgactgccaccccgctgagaattcctgctgtcactggagtgggggctgttttctctcccatgcctctggtaccttgggggtcccccctgctcccaagggctgcttccaccaccctgtccatccatcccgattggctcccaggaggttttagctccgggcttcctgtctcccacaccactcctcacagttctccatgatttcaacatccaggtgggcgacgcagcctctcggttccttgaccctctgngtgatcctgctgcttctaccgggccaaccagtactcctaggagccctcacaat

SEQ ID NO: 187 - DNA, 1706 bp, Homo sapiens
  SITE (1424): n equals a,t,g, or c
  SITE (1665): n equals a,t,g, or c
  SITE (1688): n equals a,t,g, or c
ggcttcctcgggtactcggccactcggggcatcgcggcggcctttctagccgctgtcccaagggttggtctcgcgctttcggctgcgagctctctgtggtgctggcagcgacatgtggcgcctcccgggactcctgggccgagctcttccccgtacactgggacctagcctctggagggtgactcctaagtccaccagcccagatgggcctcagactacctcctccactttgctggttcctgtgcctaacctcgacaggtcaggtccccatggcccaggcacgagcgggggtccaaggtcccatggatggaaggatgccttccaatggatgtcttcccgtgtctccccgaacaccctatgggatgccatatcttggggcactctggccgtgctggccctgcagctggcaaggcagatccacttccaggcatccctgccagcaggacctcagcgggtagaacactgctcctggcacagtcccctggaccgtttcttctcatctcccttgtggcacccatgctcctcactgcgacaacacatcctccccagccccgatggcccagctcccaggcacactggcctcagggaacccaggcttggccaggaagaagcctcagctcagccccggaacttctcacacaactctttgagaggagctcgtcctcaggacccctctgaggaaggtcccggtgattttggcttcctgcatgccagtagtagcatcgagtccgaggcaaaaccagcccagcctcagcccactggtgaaaaggaacaagataaatcaaaaactctttcccttgaggaggctgtgacttccattcagcagctcttccagctcagtgtttccatcgctttcaacttcctgggaacagagaacatgaagagtggcgaccacacggcagccttttcttacttccagaaagctgcagcccgcggctacagcaaagcgcagtacaatgcgggcttgtgtcatgagcatggcagaggcacccccagggacattagcaaggcggtcctttattatcagttggctgccagccagggccacagcctggctcagtaccgctatgccaggtgcctactacgagacccagcctcttcgtggaaccctgagcggcagagggcagtgtccttgctgaagcaggctgcagactcaggcttgagagaggcccaagctttcctcggggtgcttttcaccaaggagccctacctggatgagcagagagctgtgaaatatctttggcttgcagccaacaatggggactcacagagcaggtaccaccttggaatttgctatgagaaaggccttggtgtgcagaggaatctgggagaggccttgagatgttaccagcagtcagccgctctgggaaatgaggccgcccaggagaggctgcgagccctcttttccatgggggctgcagccngggggcccagcgacctgacagttacaggactgaagtctttctccagcccctccctctgcagcttgaacaccctgctagcaggaacctcacgcctaccacatgcctcgagcacaggcaaccttggcctcctctgcagaagtgggcatytcggagccagcctggaagcctccagcagggctattcccccacamccytacccaytggaaaggagtgttktaagaytaggttttggytaaggaanttccagcgggggtttcaagtttncccaaggcaattttcaag

SEQ ID NO: 188 - DNA, 1150 bp, Homo sapiens
  SITE (407): n equals a,t,g, or c
  SITE (413): n equals a,t,g, or c
ggtcgacccacgcgtccgcactcagacaccgtgtcctcttgcctgggagaggggaagcagatctgaggacatctctgtgccaggccagaaaccgcccacctgcagttccttctccgggatggacgtggggcccagctccctgccccaccttgggctgaagctgctgctgctcctgctgctgctgcccctcaggggccaagccaacacaggctgctacgggatcccagggatgcccggcctgcccggggcaccagggaaggatgggtacgacggactgccggggcccaagggggagccaggaatcccagccattcccgggatccgaggacccaaagggcagaagggagaacccggcttacccggccatcctgggaaaaatggccccatgggaccccctgggatgccangggtgnccggccccatgggcakmcctggaragccagaaattccagtcagtgttcacggtcactcggcagacccaccagccccctgcacccaacagcctgatcagattcaacgcggtcctcaccaacccgcagggagattatgacacgagcactggcaagttcacctgcaaagtccccggcctctactactttgtctaccacgcgtcgcatacagccaacctgtgcgtgctgctgtaccgcagcggcgtcaaagtggtcaccttctgtggccacacgtccaaaaccaatcaggtcaactcgggcggtgtgctgctgaggttgcaggtgggcgaggaggtgtggctggctgtcaatgactactacgacatggtgggcatccagggctctgacagcgtcttctccggcttcctgctcttccccgactagggcgggcagatgcgctcgagacccacgggccttccacctccctcagcttcctgcatggacccaccttactggccagtctgcatccttgcctagaccattctcccctccagggagcccaccctgacccacccccactgcaccccctccccatgggttctctccttcctctgaacttctttaggagtcactgcttgtgtggttcctgggacacttaaccaatgccttctggtactgccattcttttttttttttttcaagtattggaaggggtggggagatatataaataaatcatgaaatcaawaaaaaaaaaaaaag

SEQ ID NO: 189 - DNA, 1233 bp, Homo sapiens
gcgagcggccgctcgcggatctagaactagtcggacgcgtgggaagcagatctgaggacatctctgtgccaggccagaaaccgcccacctgcagttccttctccgggatggacgtggggcccagctccctgccccaccttgggctgaagctgctgctgctcctgctgctgctgcccctcaggggccaagccaacacaggctgctacgggatcccagggatgcccggcctgcccggggcaccagggaaggatgggtacgacggactgccggggcccaagggggagccaggaatcccagccattcccgggatccgaggacccaaagggcagaagggagaacccggcttacccggccatcctgggaaaaatggccccatgggaccccctgggatgccaggggtgcccggccccatgggcatccctggagagccaggtgaggagggcagatacaagcagaaattccagtcagtgttcacggtcactcggcagacccaccagccccctgcacccaacagcctgatcagattcaacgcggtcctcaccaacccgcagggagattatgacacgagcactggcaagttcacctgcaaagtccccggcctctactactttgtctaccacgcgtcgcatacagccaacctgtgcgtgctgctgtaccgcagcggcgtcaaagtggtcaccttctgtggccacacgtccaaaaccaatcaggtcaactcgggcggtgtgctgctgaggttgcaggtgggcgaggaggtgtggctggctgtcaatgactactacgacatggtgggcatccagggctctgacagcgtcttctccggcttcctgctcttccccgactagggcgggcagatgcgctcgagccccacgggccttccacctccctcagcttcctgcatggacccaccttactggccagtctgcatccttgcctagaccattctccccaccagatggacttctcctccagggagcccaccctgacccacccccactgcaccccctccccatgggttctctccttcctctgaacttctttaggagtcactgcttgtgtggttcctgggacacttaaccaatgccttctggtactgccattcttttttttttttttttcaagtattggaaggggtggggagatatataaataaatcatgaaatcaatacawaaaaaaaaaaaaaaaaaaaaaaaaaaaaaaaaaaaaaaaaaaaaaaaaaaaaaagggcggcc

SEQ ID NO: 190 - DNA, 633 bp, Homo sapiens
  SITE (1): n equals a,t,g, or c
  SITE (3): n equals a,t,g, or c
  SITE (7): n equals a,t,g, or c
  SITE (11): n equals a,t,g, or c
  SITE (596): n equals a,t,g, or c
  SITE (597): n equals a,t,g, or c
  SITE (598): n equals a,t,g, or c
  SITE (599): n equals a,t,g, or c
  SITE (600): n equals a,t,g, or c
  SITE (601): n equals a,t,g, or c
  SITE (602): n equals a,t,g, or c
  SITE (603): n equals a,t,g, or c
  SITE (604): n equals a,t,g, or c
  SITE (605): n equals a,t,g, or c
  SITE (606): n equals a,t,g, or c
  SITE (607): n equals a,t,g, or c
  SITE (608): n equals a,t,g, or c
  SITE (609): n equals a,t,g, or c
  SITE (610): n equals a,t,g, or c
  SITE (611): n equals a,t,g, or c
  SITE (612): n equals a,t,g, or c
  SITE (613): n equals a,t,g, or c
  SITE (614): n equals a,t,g, or c
  SITE (615): n equals a,t,g, or c
  SITE (616): n equals a,t,g, or c
  SITE (617): n equals a,t,g, or c
  SITE (618): n equals a,t,g, or c
  SITE (619): n equals a,t,g, or c
  SITE (620): n equals a,t,g, or c
  SITE (621): n equals a,t,g, or c
  SITE (622): n equals a,t,g, or c
  SITE (623): n equals a,t,g, or c
  SITE (624): n equals a,t,g, or c
ngngtgntcgncgccccgattcccgggttcgacccacgcgtccgccatccggcccgagattagggaggattgactgtgtcagggatggcgggtggcctctctcgctgccagggcccttgtcagagcagccaggctggacagacggcctccctcctctccatctgaccggcacctgctgcttcggggcttaggccaccgctccctgtccccagaggagatagccccagatggactggaatgttgtggcatgagagcgcatgtgtgcgatggccccgctgtggtcccctctctgtccctccatctgtatgtgttctgtgtcccttgcatgtgtgcgtgttagagtgagcgcgtatgcatcaactcattgggctcttggctgctcacaaggcaaatttgacttggaaagactttcatctccttggaaccaagacttcctgagtccccctcaccctggccctgttccaccatggttatctgggtattggggaatggaaactttgggggagtgactttttaaagagacacttataatttctactactgcactactgtccattgtgggatgattaaacatggtatttaactgtgcaaaaaannnnnnnnnnnnnnnnnnnnnnnnnnnnnaaaaaaaaa

SEQ ID NO: 191 - DNA, 705 bp, Homo sapiens
gcccacgcgtccgcggacagcgtgggagcggcagagacggaagaacagcgctcccgaggccgcgggagcctgcagagaggacagccggcctgcgccgggacatgcggccccaggagctccccaggctcgcgttcccgttgctgctgttgctgttgctgctgctgccgccgccgccgtgccctgcccacagcgccacgcgcttcgaccccacctgggagtccctggacgcccgccagctgcccgcgtggtttgaccaggccaagttcggcatcttcatccactggggagtgttttccgtgcccagcttcggtagcgagtggttctggctttaccttgtgggggtcagaatattcgtggaactggaatgccatagatgaggggcccaagagggacattgtcaaggaacttgaggtagccattaggaacagaactgacctgcgttttggactgtactattccctttttgaatggtttcatccgctcttccttgaggatgaatccagttcattccataagcggcaatttccagtttctaagacattgccagagctctatgagttagtgaacaactatcagcctgaggttctgtggtcggatggtgacggaggagaaccgatcatactggaacagcacaggcttcttggcctggttatataatgaaagcccagttcggggcacagtagtcaccaatgatcggtggggagc

SEQ ID NO: 192 - DNA, 2901 bp, Homo sapiens
ccacgcgtccgtacatgctggccagctgaaaaaggagactttcatttcactgactgtttattttttggttcactgatgtctgctacagatccagtgacagtgctggccattttccatgaactgcacgtcgaccctgacctgtacacactcttgtttggagagagtgtgttgaatgatgcagtggccatagtccttacatattctatatccatttacagtcccaaggagaatccaaatgcatttgatgccgcagcattcttccagtctgtggggaatttcctgggaatcttcgctggctcatttgcaatggggtctgcgtatgccatcatcacagcactgttgaccaaatttaccaagctgtgtgagttcccgatgctggaaaccggcctgtttttcctgctttcttggagtgccttcctgtctgccgaggctgccggcctaacagggatagttgctgttctcttctgtggagtcacacaagcacattatacctacaacaatctgtcttcggattccaaaataagaactaaacagttgtttgaatttatgaactttttggcggagaacgtcatcttctgttacatgggcctggcactgttcacgttccagaatcatatctttaatgctctttttatacttggagcctttctagcaatttttgttgccagagcctgcaacatatatcccctctccttcctcctgaatctaggccgaaaacagaagatcccctggaactttcagcacatgatgatgttttcaggtttgcgaggagcgatcgcatttgccttagctattcggaacacagaatctcagcccaaacaaatgatgtttaccactacgctgctcctcgtgttcttcactgtctgggtatttggaggaggaacaacccccatgttgacttggcttcagatcagagttggcgtggacctggatgaaaatctgaaggaggacccctcctcacaacaccaggaagcaaataacttggataaaaacatgacgaaagcagagagtgctcggctcttcagaatgtggtatagctttgaccacaagtatctgaaaccaattttaacccactctggtcctccgctgactacaacattacctgaatggtgtggtccgatttccaggctgcttaccagtcctcaagcctatggggaacagctaaaagaggatgatgtggaatgcattgtaaaccaggatgaactagccataaattaccaggagcaagcctcctcaccctgcagtcctcctgcaaggctaggtctggaccagaaagcttcaccccagacgccaggcaaggaaaacatttatgagggagacctcggcctgggaggctatgaactcaagcttgagcaaactttgggtcaatcccagttgaattaattggcatgaagagtacagatgtaatcacaagtaatgcaagactcactgaggaatacaagccaagctgatgaggcagtacaggggagaggctggaaaacatattaagagcataaattggagagaatcaaagccttgtcacatggatcctctggtgcctgaagaaatgagattttattatccctctctattatgcaaatgaatttagttttttgacagcagccattctgattactggattggctggggtggggatgggggtatcaggagtctagctgctggaggatgggacagctgtgctgggtcttcagggcatttctgctgcgaatgcggctctccaggcccttcacttctattctggattttattccctccattaaggagagtttaaaaataaaagaaagcttctgagagtaaacattttgctcctaagctgaagggaatgcmcagctatttagtaagtgataagtttcttattttgaggacttgactcccatttgctctcagtgaccccagggcagagcccagagaagtgttccgtacccactgctgatggtttcccagagcccacactgagttgaagaacctattgttcttcttggcatccttcttatgctacttctcccatcgctcaaaggggttgcctatggctgggtgtgccctgccctaaatgcagcaccactttcaagcttagtaggaccattccaagaaaaccaggtttcttctccccataccacgttgtgcctgaagaacaagccttcccgtccttgcctgcatgtgagtcacttcttggctgtgcagcaggtccccccctccccgcgatatgctggagggtaggattctgcagcctgtgttgctctctacctggcagcagactgtgcaggagccccaacctgtcctccaattccagcattcacagctgatgagcagtgcaggagcagggcgagaggaacagagccaatgatgtgtgggttacactgaggagccaaggacagggcctcaggtctcccccttacaaggcgtggctcatggcctgcattccagagaccaacatgatagcttttaattcagctgcatgacctgtgccttttaagccataaagatacctcaagcctagcacctcttgaaatccagatgttcatattagactcgaaaaaataggctccaggcctaggtgcccaggctatgatgagtctgcttttgaaggaggtagggaatgacatcttccttggacccaaagcttaaaagtaatgtatgctttgctgaccactgtttgttaggccttaaacaacattcactgtggtggtatcaggcacactgctatgtgcatcaattatttttttgctttccaaacagaatctctggggcacaagttttacactcaagctaagtataactttgtcatttcaggtaaatatgacaagtggtggagcatgaagttttctaatttgacttaatcctaataaatttttgttacaaagtaaaaaaaaaaaaaaaaaaaaaaaaaaaaaaaaaaaaaaa

SEQ ID NO: 193 - DNA, 611 bp, Homo sapiens
  SITE (598): n equals a,t,g, or c
  SITE (611): n equals a,t,g, or c
cctaagcactttcacctctgttaccttgttgaacatgatctctattgcatttcatgccccttaagacagtttcataattatgaaaatagttgttagggattttccaagggaacaacatcagtatttacacaaggaaggcctttgtatttttaaaatttctactgtagctataattggttcccattgktatttctaatactataaatttgtgcattctttttctttatccacttttatggaagatggtgtgttttaataacttttttttaacttagcttttgattttggatattttgctcattgattaccagtgattttttcttttcttacaggagcttttaagtccacagtttccctgtgcatagtgctttagctgactcctaaaagttttgctatgcagtggttgktaatcactcccaggcttttctactttccattattacttctgkggcttgggagtgktaaawttcttttwatttcaattttggkgawgggcarggtcttgcttcatwactcargccgaatgcatggkgscaatatggsttamcaaagcctgrctttcaaggttaagctatcctcccccttaccctcccagganctgggcctacggn

SEQ ID NO: 194 - DNA, 3111 bp, Homo sapiens
gcgctgtgcctgcatatcatccaccaccaccctagcccagccttcccactgccccaggaaaagctcttctcctggccacctctgccccccagcacctcaaacttgcatggctgggctgtggcctctgcggccaggaagcctgacactaggcaccccccaggcgagagctagtggggtgcagagggccccatgccagacagcccttggggctcgttgcamtttaagaaataggatytgtggtgtattccagggggcctgatggacacctttcccgggcgtctgcagctgccctgcccgtgcccgcctgcagtggttggagacgggagtggcccttcggctcccgagctccctctggggacggctggctcactgtctccagttctcaatggccaacgaaggtgcttggaaacacctaaccttgcaagttttaccgccttttgaggaacacaaatcggagaacaaacccagggttcaggcgtgttttctgtgaatgttggatgatgaatttttgtctcttctggtggagctgtgcctggccctgtaggcccagggttggctggaaggtgacatctgtgtttcgttttagctgaggttggcagaaacgttcccaaactcccccagccctggaccccagcagatgaggaaacggccccatttactgaccccgcccccttttcgaggttatgctcacctggtcagctcctcacgtaattgggggtggagggaaagcatggtggtgccctgggccgtccctgtgtgaacgcaggcaaaagcagcccagtccccctcactgcttgagctaacactgccacctcttttgtgtgagcacaaaagccacgtcccaagccacctggcccgattccacagatgtatgtgcggccagtgacttccccaggagtgtggagggggtggtgaggaggagcacctgggctctctacccctctcctcacagaagtacctgaaactaggtctggggcactcccaatgcagcgccttgtcagccaaggtgggcaggcagggactgtggcagcttatgtccaaagggagcccccatgcacaggaagccacagggttcctcttgtttcccccgctaacttcagcctctcrtctgctgctcygggctgagggactagaggacatctcggtcgtttgaggggcatggccagtcgtggcaggccggccttcagcgtccggtcagggaagcgtgcagcccaaatgggcacttgcatgggagccacagaggagygtccctggggattgttgggaccatgctgcccccactcccgcttttgttggggctctaagttctggaaggtgtgtgcacagagggtgctcatgggactcgcatgcagctctcagcactgggtgggagggcgttggcttgtccagaatggggacgtggggcagccacccctgcccagcgagagcgcagacaccgtgtgaggggacagcagcccttggtgcaaagccagagactgatcctggctctgacggctgaagagggaagacccaaggctgggtggcgtggctcgtgaatccacttagaattcttggcttgtgtcgcatactgggtgtcacggcacacatttactctgcattgtccccgtctttcccatcgcctagcgtttggggaggaacagggagagagcttcggggcgtctgtctccgtgctctcctgcctccaccgccttggttttgcttcctgctggaggcagggcacctgctgcgacccagattcttctgcaggatgtgtctgtctttgtcacggtggacagagggtgacatcataggagcagctcgctggccagaaggggatgggggcatccctgtgcctcactcagctcctgctgctcttagggaaaggaggcctgggtcaagccagcatccccttggtaaagacccccgcaggccaccaggcattctggacacgcacacacacacacacacacacacacacacacaaaacttcacagcaggccagctgcagtgacttgtcatcaagagtcacctcagctgcgcccccctcccatcctttcctatgagaagccactgctttgggggcgccggctagaaaaagtagggtgcggtggccaggagggcccctgccgcgcggggggctgggtctggttgagtcgctgctttcccgagggcagcgcagggatccggggaagctgcggcagggagcgggygccggcttcgtggctctgaggtgtaacgggggtrggctccctccctcggaggacatcgtctgtgtccaggtcagaaagtggcccaggaagggggcagtttctgtcgcgggtccggtgggggcgcggccgcggtgcggtcggtgcagcgtggccaatgcgcggcgcgcgcgggggacagagcaggaggcggtctgtcacctcggccactgctgacctgggctggcctcccccagccctcccgtggcggagcggcagcgatgctacaggcctaagttattgtttgcataaaaagaatcatgttccctgtgtacatttaagaaaaaaacaaaaaaacggaaatgtcagaattgtatggaaataaaacttgtttgaaaatttggaatagtgctgctgccagcttatttttctggtacttgtattttcacatgttaaatgatctttatatatgttgaattaacaaatattttgagtttctgagaaaaaacaaaacatattaatggtattgaaatgtgttagtagtctggctgtgtgcccaaaattctgtttcgcagcaaaagtgaagacctgtatgtaaagaaagtataacaattatttctttgtattttaggggctttaaccggaacatcgtctagctggtgttaggaatgtttgcttaatttccagacttttttttaaaaacacatcgtgggttttttgaggctccaacctgattagtgcatggtcagccctcaatgaaggctgaggcatctctgactgaggtgtttttgtttggttttgttttttaaaatcatgtatttgctacaaagtattgtacttgtctcaatgggaatggtgtaaaaaacaaaaggccttatgtgatctgtatcatagttaataaatgaatcttgtaaaaaaaaacccacgcgtccgcccacgcgtccgc

SEQ ID NO: 195 - DNA, 490 bp, Homo sapiens
tggcaggagtgtatgtgagtgtgtgtgtgcatacatgtgtgtgtatgtgtgtgcatacatgtgtgtgtatgtgtgtgcatacgtgtgtgtgtgtgcatgcatgtgtgtgggcgcatgtgtgcatgtgtgtgtgtgagtgtgtgtgttggggaggaggcatggcccttgggaaggtctgtccaggttggaagccacactccctcccctcagcatggaggtgggcgtgtgcgtggaggcctatcgccaggaggctgagacccaccggcgccacatsaacagtgcctttatgacctttgtggtcctggacgcagatgaccagccccagttgctgccctggattcggccccagcccggcgatggtgagcggcggtaccgagaggccagtgccagaaagaagatccgcctggacaggaagtacatcgtgtcctgtaagcagacagaggtgcccctctccgtcccctgggaccctagcaaccaggtgtacctgagc

SEQ ID NO: 196 - DNA, 1527 bp, Homo sapiens
tttgcatcctggtagcatgcctttatcggggagtgggtgtgagggaaggcggggaccgctggcaggtggaggggcagtatggttccaggacccactcccggtagttctgggtggtgccgggcgggcgctggggtgccgacagggagggcacgtagtctgatgccctccacagtggctccaccccgtaccggttcctgttgagcacgtattccttgccccggattggcctgtctttccacagcgcgctcccccaccgggtgctgggggcctggtactgggcagggacgatggggtcatgccaggcggtctcccgcaggtgctgggtgtaggccgatggcatgctgcactcacggtgttggtagcagctgtgcmagcggttgtaggcytcgcggaaggggctggccggggcccgtggcaggttgtaccaggcttcccaggcgtccgagttggtcaggcytgtgtaccacagctkgccggctgcgtcccgtcccatgggcgtgtacttccagcgtgtggcctgcctgatggytggtggccagcgggaaccctccagggacaggtagtcatcgctgtacagcggtgctgggaagctggcctcgagggtccccgaggggatacagggccgtgcagcctcttgcctgagggtttgcatgtttgcctggatcccccgggctcctgccagaaggcctctaaggccaccgttgracagcataaaggccacccagtgtctcggcaaccacgctgaccactccctcctcccagctgcggggtgaggtggcctcgagggaagggctggagagtcgttctgagtatttaacaactgggggtgacacagtgtgggtgggcaaggccagggccactgccaggtggggtccgtggccctgagcccccagctctatgcaccccccacctggggtctggcttctccatctccacacccccttgaggggcttctgtctccccctgccccttcgatcgcaggaggcagtgcctggccggggtcgcaggcacctgtcaccccagctcctcactcctcacccactcacatccagtccgtttgtaaaatacacccaggatgagacctgcacgcagtggctcacagcagcacgatttgtgacagcccgaggcggagaacaccgaacacccagtgaaggtgaggggatcagcacggcgccgccaccgtgctggaacgagactcagccacaaggaggtgcgacgtctgacccaggccacagtgcggatgsaccttgaggatgtcacgctcagtgagagacaccagacacagaagggtacgctgtgatcccacttctatgaaatgtccaggacagaccaatccacagaatcagggaraggattcgtgggtgccgggactggggagggggacctgggggtgactaggtgacataatggggacagggctgccttttgggtgatgagaatgttctggaatcagatgggatggctgcacggcgtggtgaaggtactgaacgccacctcactgtaagacggtagattttgtattttacc

SEQ ID NO: 197 - DNA, 3746 bp, Homo sapiens
gcggccgctgtccctggtggcgcggctgagctacgccgtgggccacttcctcaacgacctgtgcgcgtccatgtggttcacctacctgctgctctacctgcactcggtgcgcgcctacagctcccgcggcgcggggctgctgctgctgctgggccaggtggccgacgggctgtgcacaccgctcgtgggctacgaggccgaccgcgccgccagctgctgcgcccgctacggcccgcgcaaggcctggcacctggtcggcaccgtctgcgtcctgctgtccttccccttcatcttcagcccctgcctgggctgtggggcggccacgcccgagtgggctgccctcctctactacggcccgttcatcgtgatcttccagtttggctgggcctccacacagatctcccacctcagcctcatcccggagctcgtcaccaacgaccatgagaaggtggagctcacggcactcaggtatgcgttcaccgtggtggccaacatcaccgtctacggcgccgcctggctcctgctgcacctgcagggctcgtcgcgggtggagcccacccaagacatcagcatcagcgaccagctggggggccaggacgtgcccgtgttccggaacctgtccctgctggtggtgggtgtcggcgccgtgttctcactgctattccacctgggcacccgggagaggcgccggccgcatgcggaggagccaggcgagcacacccccctgttggcccctgccacggcccagcccctgctgctctggaagcactggctccgggagccggctttctaccaggtgggcatactgtacatgaccaccaggctcatcgtgaacctgtcccagacctacatggccatgtacctcacctactcgctccacctgcccaagaagttcatcgcgaccattcccctggtgatgtacctcagcggcttcttgtcctccttcctcatgaagcccatcaacaagtgcattgggaggaacatgacctacttctcaggcctcctggtgatcctggcctttgccgcctgggtggcgctggcggagggactgggtgtggccgtgtacgcagcggctgtgctgctgggtgctggctgtgccaccatcctcgtcacctcgctggccatgacggccgacctcatcggtccccacacgaacagcggagcgttcgtgtacggctccatgagcttcttggataaggtggccaatgggctggcagtcatggccatccagagcctgcacccttgcccctcagagctctgctgcagggcctgcgtgagcttttaccactgggcgatggtggctgtgacgggcggcgtgggcgtggccgctgccctgtgtctctgtagcctcctgctgtggccgacccgcctgcgacgctcccgaggcggagaacaccgaacacccagtgaaggtgaggggatcagcacggcgccgccaccgtgctggaacgagactcagccacaaggaggtgcgaagctctgacccaggccacagtgcggatgcaccttgaggatgtcacgctcagtgagagacaccagacacagaagggtacgctgtgatcccacttctatgaaatgtccaggacagaccaatccacagaatcagggagaggattcgtgggtgccgggactggggagggggacctgggggtgactaggtgacataatggggacagggctgccttctgggtgatgagaatgttctggaatcagatgggatggctgcacggcgtggtgaaggtactgaacgccacctcactgtaagacggtagattttgtattttaccacaataaacaaaacaaaacaaaaccaaaaaaaammmaaaaaacatccagaaacctcctgccctgccctgcccctcctctggctgggcccggccttgggtgggggcggagctgcaccctggtctccgcttcccctgcccttgtcaggtcmccacagatacgaccctgcctttmccatctggacacgcacccaggagctccactccctcggggtaggtgcccaagtcctccctgaggcccacaaggccctgcacgccctgccctcctctcctcactctgttcctcccgcataccaggtgccgtcctgccccagggcctttgcatggctgtgccctttgcctctcacccaggcgtccctgccttctccagccctggctgaaatgccaggcttgtggtgagcctctgatccaaggccgcccttccccaaggccccctccccacccttgtgacgccacctcctcacttcctcataagcttctctgtctctgggctgtgtcccccatgccagctccacatgggccaggtctgctcggtttcatcatctccaatgcccaggatggggcctgccccagctccttcaccctcttctcaggcaccgcgcaagagcgagcctcaaaaccacctggggcctcctggctgccaggacccccacagcctcccctgcagcccccggccccccggcctcctggctccctcagccacttcccagccattcctcctgttctctccgcccagaccccggggaggcaccagcaccccctgggccaggctcctgcctcctgcacctctcatcgcagaacctatggcagcctgagtttttcaattctctttccctctcactgcaccagctacattccaggatcaacagaaaagttgcagcccgccctgcggggcccttggtcagcctccccctccatctgggcgtctcccaaccactgccagggtcgccccaggaagcgatggccccactggccttcgtctgcctgtcgggtggagctgacagcagaggcacctgccccagcgctgctgagtggcccccgtgccccgcaaagcctgacgtacactcccctggggcccctccacctcctctcagctgtcctgggccatggggaaccaattcccccatttctacacgagccctggcccatcatcatgggaccctcccaccacggccttcaccccccttgctctgtccctcctggccccatctggccagccctgggggtgaactcagcccagcagtgcccaccctccctccctgatggtgtcaaccgagcacctcctccctggaacagggccgtccagctggagcgcagggacttgcctggagtccagtccttggccctgcaggattgtggccggcgccctggcagacgggcctgggaggcgtctctgcggccttcgagggctgagctccccatctgtgaaatgcaggcctgggaagcccctcagaagctgcttctgcagctccagggccagatgggggctctagggcaggaccgtgtgaccccacccgagccggggacctagagccagccagtcccggccacacatgaatccacgtgtttaatgacagcgtcactgcattacatgagaaacaaggctggtctgtcctgggagctcccccaccccctagcatgggcagaaccagccccaacacaaacctcacgccgtccgcctggccctgcggcggttcccagtcccaggaggagcctctgaaggccactgtgggttgtgcactgagccagccaagccctgacgcccacagcgacaaggcggctctttggcaactgcgggcaggggcgggcatgggcgaaggcagggttggttttcttatttaaaaaccttgaaacagtaagaccgtgaccaccggacgcgtgggtcgacccgggaattccggaccggtacctgcaggcgtaccttctatagtgtcacctaaatagctttttgcaaaagctata

SEQ ID NO: 198 - protein, 91 aa, Homo sapiens
MVLRGWGLAWSLSPVVCGYSGDMKGVCWGRSDHSLLPSEILLPPAPCPSSAVLHNPPPTPHLPSPVLVRIQEAPTWAQRSSLGASPLHKGD

SEQ ID NO: 199 - protein, 49 aa, Homo sapiens
MSCTLLICTVVLGVTTPAIGPAAPSLLATPPQAAAATMQPRLGRAAGAA

SEQ ID NO: 200 - protein, 95 aa, Homo sapiens
MVPCRKTLLFLWVGSLCRDVGSWSGWPFGLSTATQPRLRLGKQTGAGQARRACRTVILRCGSCCRGRRTGSVVAWSSLPQRTSAAELRWRPWGPV

SEQ ID NO: 201 - protein, 175 aa, Homo sapiens
MATPSGLGALLLLLLLPTSGQEKPTEGPRNTCLGSNNMYDIFNLNDKALCFTKCRQSGSDSCNVENLQRYWLNYEAHLMKEGLTQKVNTPFLKALVQNLSTNTAEDFYFSLEPSQVPRQVMKDEDKPPDRVRLPKSLFRSLPGNRSVVRLAVTILDIGPGTLFKVRTQGSSKVKC

SEQ ID NO: 202 - protein, 126 aa, Homo sapiens [sequence omitted]

SEQ ID NO: 203 - protein, 187 aa, Homo sapiens
MWCASPVAVVAFCAGLLVSHPVLTQGQEAGGRPGADCEVCKEFLNRFYKSLIDRGVNFSLDTIEKELISFCLDTKGKENRLCYYLGATKDAATKILSEVTRPMSVHMPAMKICEKLKKLDSQICELKYEKTLDLASVDLRKMRVAELKQILHSWGEECRACAEKTDYVNLIQELAPKYAATHPKTEL

SEQ ID NO: 204 - protein, 38 aa, Homo sapiens
MTWGTKATWYLASSSSCGSYCPPPCWWASSGCTGPHRT

SEQ ID NO: 205 - protein, 163 aa, Homo sapiens
MGGMIIVLLICIVWFPLLFMSLIKSVAGVINQPLDVSVTITLGGYQPIFTMSAQQSQLKIMDQQSFNKFIQAFSRDTGAMQFLENYEKEDITVAELEGNSNSLWTISPPSKQKMIHELLDPNSSFSVVFSWSIQRNLSLGAKSEIATDKLSFPLKNINSKEYR

SEQ ID NO: 206 - protein, 369 aa, Homo sapiens
MAFKLLILLIGTWALFFRKRRADMPRVFVFRALLLVLIFLFVVSYWLFYGVRILDSRDRNYQGIVQYAVSLVDALLFIHYLAIVLLELRQLQPMFTLQVVRSTDGESRFYSLGHLSIQRAALVVLENYYKDFTIYNPNLLTASKFRAAKHMAGLKVYNVDGPSNNATGQSRAMIAAAARRRDSSHNELYYEEAEHERRVKKRKARLVVAVEEAFIHIQRLQAEEQQKAPGEVMDPREAAQAIFPSMARALQKYLRITRQQNYHSMESILQHLAFCITNGMTPKAFLERYLSAGPTLQYDKDRWLSTQWRLVSDEAVTNGLRDGIVFVLKCLDFSLVVNVKKIPFIILSEEFIDPKSHKFVLRLQSETSV

SEQ ID NO: 207 - protein, 85 aa, Homo sapiens [sequence omitted]

SEQ ID NO: 208 - protein, 172 aa, Homo sapiens
MHGARLFVCLFVCFRQSCYVAQAGVQWHNHSSLQPLSPGFKRFFCLNLPSSWDYRHMATCPWLIFVFLVEMEFRHVGQAGLGLLTSSDLPALAFQSAGITGLSHHAWPGRFLKKVIEICSCPVPRGSHAGLFSAPGLPCESGGAAVLLQEGQTPVQEARTHHQLVGGQGRLC

SEQ ID NO: 209 - protein, 829 aa, Homo sapiens
MAPAGCCCCCCFWGGAVAAAGAARRVLLLLLLGVLSARLRPGALATEHYSPLALLKQELQHRQQQEAPAGGGGCSPQSGDWGDQYSAECGESSFLNFHDSDCEPKGSSPCDSLLSLNTEKILSQAKSIAEQKRFPFATDNDSTNEELAIAYVLIGSGLYDEAIRHFSTMLQEEPDLVSAIYGRGIAYGKKGLHILSPLGRINEAVNDLTKAIQLQPSARLYRHRGTLYFISEDYATAHEDFQQSLELNKNQPIAMLYKGLTFFHRGLLKEAIESFKEALKQKVDFIDAYKSLGQAYRELGNFEAATESFQKALLLNQNHVQTLQLRGMMLYHHGSLQEALKNFKRCLQLEPYNEVCQYMKGLSHVAMGQFYEGIKAQTKVMLNDPLPGQKASPEYLKVKYLREYSRYLHAHLDTPLTEYNIDVDLPGSFKDHWAKNLPFLIEDYEEQPGLQPHIKDVLHQNFESYKPEVQELICVADRLGSLMQYETPGFLPNKRIHRAMGLAALEVMQAVQRTWTNSKVRMNGKTRLMQWRDMFDIAVKWRRIADPDQPVLWLDQMPARSLSRGFNNHINLIRGQVINMRYLEYFEKILHFIKDRILVYHGANNPKGLLEVREALEKVHKVEDLLPIMKQFNTKTKDGFTVNTKVPSLKDQGKEYDGFTITITGDKVGNILFSVETQTTEERTQLYHAEIDALYKDLTAKGKVLILSSEFGEADAVCNLILSLVYYFYNLMPLSRGSSVIAYSVIVGALMASGKEVAGKIPKGKLVDFEAMTAPGSEAFSKVAKSWMNLKSISPSYKTLPSVSETFPTLRSMIEVLNTDSSPRCLKKL

SEQ ID NO: 210 - protein, 108 aa, Homo sapiens
MTSQNLWVIVVIANSILVIVAQYRDEGNRFCNQMILGSESTLPLTSYMTSSNFHHLSMLQFPHRQDGCGGRGTTVQIHHPKFKMLQNLGRAWWLIPVIPALWEVKVDG

SEQ ID NO: 211 - protein, 153 aa, Homo sapiens
MMWLLLTTTCLICGTLNAGGFLDLENEVNPEVWMNTSEIIIYNGYPSEEYEVTTEDGYILLVNRIPYGRTHARSTGPRPVVYMQHALFADNAYWLENYANGSLGFLLADAGYDVWMGNSRGNTWSRRHKTLSETDEKFWAFSFDEMANMISQE

SEQ ID NO: 212 - protein, 87 aa, Homo sapiens
MRFIWLMFLQAVQASGKGLRKLPHTVEDEGEPECADYMVREWKQERGAGGARIFSTISSWMSTVAHACNPSTLGAQDGRITSAQEFN

SEQ ID NO: 213 - protein, 90 aa, Homo sapiens
MDRRRMALRPGSRRPTAFFFHSRWLVPNLLAFFLGLSGAGPIHLPMPWPNGRRHRVLDPHTQLSTHEAPGRWKPVAPRRMKACPQVLLEW

SEQ ID NO: 214 - protein, 34 aa, Homo sapiens
MMSIHCVQPLLPLFLPSSYFKQFLLLPWTFGVAL

SEQ ID NO: 215 - protein, 245 aa, Homo sapiens
MFLLFLLTCELAAEVAAEVEKSSDGPGAAQEPTWLTDVPAAMEFIAATEVAVIGFFQDLEIPAVPILHSMVQKFPGVSFGISTDSEVLTHYNITGNTICLFRLVDNEQLNLEDEDIESIDATKLSRFIEINSLHMVTEYNPVASPEYEENMHRYQKAAKLFQGKILFILVDSGMKENGKVISFFKLKESQLPALAIYQTLDDEWDTLPTAEVSVEHVQNFCDGFLSGKLLKENRESEGKTPKVEL

SEQ ID NO: 216 - protein, 459 aa, Homo sapiens
MFPLHLAVLFGFSDCCRKLLSSGQLYSIVSSLSNEHVLSAGFDINTPDNLGRTCLHAAASGGNVECLNLLLSSGADLRRRDKFGRTPLHYAAANGSYQCAVTLVTAGAGVNEADCKGCSPLHYAAASDTYRRAEPHTPSSHDAEEDEPLKESRRKEAFFCLEFLLDNGADPSLRDRQGYTAVHYAAAYGNRQNLELLLEMSFNCLEDVESTIPVSPLHLAAYNGHCEALKTLAETLVNLDVRDHKGRTALFLATERGSTECVEVLTAHGASALIKERKRKWTPLHAAAASGHTDSLHLLIDSGERADITDVMDAYGQTPLMLAIMNGHVDCVHLLLEKGSTADAADLRGRTALHRGAVTGCEDCLAALLDHDAFVLCRDFKGRTPIHLASACGHTAVLRTLLQAALSTDPLDAGVDYSGYSPMHWASYTGHEDCLELLLEHSPFSYLEGNPFTPSLCSD

SEQ ID NO: 217 - protein, 110 aa, Homo sapiens
MKRYIISLQSPLSHSSMWPAYLLPIMLLIHLQAICHQIKKQQTEGQSQDVLTHHCNFLLEMIPFRKRLVEIGVKGTLQISPVLSYFQLYRQEQFKSKEFSRFLQCHKAVS

SEQ ID NO: 218 - protein, 107 aa, Homo sapiens
MPPPFLRKPLILCVFLPTEGNCGGSSLAFLLNFAGNSPQFLSEVRTVHYQRDWTLYPLAKWEKILPAHSTPPWPSPTPHPQQHFHGNPDGRVVLWLSCDRLAFILES

SEQ ID NO: 219 - protein, 428 aa, Homo sapiens
MGPPPGAGVSCRGGCGFSRLLAWCFLLALSPQAPGSRGAEAVWTAYLNVSWRVPHTGVNRTVWELSEEGVYGQDSPLEPVAGVLVPPDGPGALNACNPHTNFTVPTVWGSTVQVSWLALIQRGGGCTFADKIHLAYERGASGAVIFNFPGTRNEVIPMSHPGAVDIVAIMIGNLKGTKILQSIQRGIQVTMVIEVGKKHGPWVNHYSIFFVSVSFFIITAATVGYFIFYSARRLRNARAQSRKQRQLKADAKKAIGRLQLRTLKQGDKEIGPDGDSCAVCIELYKPNDLVRILTCNHIFHKTCVDPWLLEHRTCPMCKCDILKALGIEVDVEDGSVSLQVPVSNEISNSASSHEEDNRSETASSGYASVQGTDEPPLEEHVQSTNESLQLVNHEANSVAVDVIPHVDNPTFEEDETPNQETAVREIKS

SEQ ID NO: 220 - protein, 124 aa, Homo sapiens
MLTQSQQVLRGILLFLQNILQVSWGSPLALASPPSPSLQPGNGLASSLLALQPGLAGPWAGPQEPSPAMCFPKKRSLWPNLRKQWASIHINDPRGTLCPRCTGCNQRGSGGSGLIWRDRFYHHP

SEQ ID NO: 221 - protein, 87 aa, Homo sapiens [sequence omitted]

SEQ ID NO: 222 - protein, 84 aa, Homo sapiens
MEWQFGKPSFLLSLLMLLVLEWKALCGVRLGHLGLQVPNPSLKSTCLWPLRSLCPWRLYPIKIMISLPLPSLQLPSSPHRPFQL

SEQ ID NO: 223 - protein, 76 aa, Homo sapiens
  SITE (43): Xaa equals any of the naturally occurring L-amino acids
MPLPPKWPPLLTALLCHLLSTSSPLLIILPNHRSDHPLTDLSXLSIAYKNENQTTELSMTVKALHLASIYCILHAS

SEQ ID NO: 224 - protein, 142 aa, Homo sapiens [sequence omitted]

SEQ ID NO: 225 - protein, 84 aa, Homo sapiens [sequence omitted]

SEQ ID NO: 226 - protein, 88 aa, Homo sapiens [sequence omitted]

SEQ ID NO: 227 - protein, 127 aa, Homo sapiens
MMPTYAICMVLVFLLLVHLHIINTNTHTHTHTHTHTGLLPEPYMLYFQFLSVLRGYILSRWTDREYTWISTKIYSPNSPEPPASCPSPTQSISRHAVQGSTFLKAQLPTSEQVQIHPLHPPIHLSPL

SEQ ID NO: 228 - protein, 83 aa, Homo sapiens
MTSLARLPCSYLCLPCQLSSCCAFSQPISALLPSPSTPVLLSAPRPSSQGVPGTRSEFPSTPFCLPSFPRESFLDSFHLVSSH

SEQ ID NO: 229 - protein, 114 aa, Homo sapiens
MAKAPFYHLLFCFGIWSDSYSSLGLAQWRNWCSYCTGLCTPCNCDVYDCSSCFPILHFQSPRAVLSRITSTVNQRRDCTTRHVCWERRKGEKPWPKQSIPQILRHSFVYLVFHH

SEQ ID NO: 230 - protein, 81 aa, Homo sapiens
MRWRKPLCLWCLLTQGETEAQAGQPLAWGGGWVVLRPVTSPLQHPPVDPLPAPARPESCSQAQTLACPSGDAGQYSSLQPS

SEQ ID NO: 231 - protein, 273 aa, Homo sapiens
MTSGPRGVVHFYGYSVVSTLALLVSIAFPIPICQQWEPSYKRVKALSIVGGDPHLILLASTTVLVGAIVSTVQNFLFWHMKDHGSGELVMGFSVALSLLGEILLHPFKATLLRKLSRTGLVGLGLSCLAGQLLYYSFLWSWWSVLPIQILSAISNRALWWAVGASVEDLATPRMERALSALFRGHFYGSGCSLGSFVGGFVVMRFSLAVLYQACCVALLLWLALLLSIQRRLPRERKIKYSKLLSMEVSDTSDSEQGTEQDWLVKAMREEHSD

SEQ ID NO: 232 - protein, 112 aa, Homo sapiens [sequence omitted]

SEQ ID NO: 233 - protein, 82 aa, Homo sapiens
MGQLCHSPSCLPSGAFCLLLSSVLGIIVLNSTDTISSSHPPLSSNLPSWGYTTTKAHLSLGLVGFAGKENMKELYVESSRSF

SEQ ID NO: 234 - protein, 136 aa, Homo sapiens
MIEDTMTLLSLLGRIMRYFLLRPETLFLLCISLALWSYFFHTDEVKTIVKSSRDAVKMVKGKVAEIMQNDRLGGLDVLEAEFSKTWEFKNHNVGGVLHPGPERPHGGPLRSSHGSGQQDAPVHLRDLRRARGRDCS

SEQ ID NO: 235 - protein, 47 aa, Homo sapiens
MKSKFCFASPMRLPKALLAFSACWQLLSAWLLTFLPTLLTNQKKSQE

SEQ ID NO: 236 - protein, 122 aa, Homo sapiens
  SITE (58): Xaa equals any of the naturally occurring L-amino acids
  SITE (99): Xaa equals any of the naturally occurring L-amino acids
  SITE (106): Xaa equals any of the naturally occurring L-amino acids
MFYLTHPIKNFNMSSRKKKCAFYIILLLLSLSPGTWFTPTPTPQLTLAVWQVPSGHLXRALCIQCCPPAVAGAVGASDKMHPQPWQCLQSCPFVNSGPXHPHARPXTAWDACAGGRAFLVRH

SEQ ID NO: 237 - protein, 90 aa, Homo sapiens
MWFKGQLHFFFLFFSFLTFLFSSLFSSLLFLSFLFFPFFLSQGFILSHRLEYNGIGSLQPQTPRLKPSSGLSLLSSWDYRCAPLPHSANF

SEQ ID NO: 238 - protein, 33 aa, Homo sapiens
MPNSLLGVFFCFVLFCFVLFCLIQSFTLSPRLE

SEQ ID NO: 239 - protein, 35 aa, Homo sapiens
MCHHAQLIFVLLVETGFCHVGQAGLELLTSHDLRT

SEQ ID NO: 240 - protein, 82 aa, Homo sapiens
MLTNRAPSSFVWFLCLACHLPSCPSATEEFAVFIPKYHSSRMGAAPCHVLGHGGIKGNTCQDNAGYDFCRPLGLASFLKRQD

SEQ ID NO: 241 - protein, 219 aa, Homo sapiens
MRPRGLPPLLVVLLGCWASVSAQTDATPAVTTEGLNSTEAALATFGTFPSTRPPGTPRAPGPSSGPRPTPVTDVAVLCVCDLSPAQCDINCCCDPDCSSVDFSVFSACSVPVVTGDSQFCSQKAVIYSLNFTANPPQRVFELVDQINPSIFCIHITNYKPALSFINPEVPDENNFDTLMKTSDGFTLNAEYMFPSQPNWIFLLLLNMSMGFLCRLQIRF

SEQ ID NO: 242 - protein, 181 aa, Homo sapiens
MGLIVVLLFPNLCMCTFHAGGFQCVLWMAGLKRRVPLHSLRYFISMVGLFSKPGLLPWYARNPPGWSQLFLGTVCKGDFTRVIATKCQKGQKSQKKPSHLGPLDGSWQERLADVVTPLWRLSYEEQLKVKFAAQKKILQRLESYIQMLNGVSVTTAVPKSERLSCLLHPIIPLSCHQWLPK

SEQ ID NO: 243 - protein, 125 aa, Homo sapiens [sequence omitted]

SEQ ID NO: 244 - protein, 132 aa, Homo sapiens
MRLLVLSSLLCILLLCFSIFSTEGKRRPAKAWSGRRTRLCCHRVPSPNSTNLKAFTAVSCNVGGLHLGLQGPWESSRTPRPCLNCAINFQSYHEPTSPHRASVATMWASPVQTTEHSTMTGHSYKSRDHQSC

SEQ ID NO: 245 - protein, 186 aa, Homo sapiens
MSGLSRPLLLAVGCLAALCVITAAGNTTLAPNVTTASSPPPTTTTVPVSPTTLSPLPVTTPAPDICGSRNSCVSCVDGNATCFWIECKGKSYCSDNSTAGDCKVVNTTGFCSAKTTTLPSTTTTSTTATTSGTTNTTLSPTIQPTRKSTFDAASFIGGIVLVLGVQAVIFFLYKFCKSKERNYHTL

SEQ ID NO: 246 - protein, 114 aa, Homo sapiens
MLVPAALTGLLVFLSGFSLFEASQISKEICEAHDILMCPLGDHSRRYQRLSETCTFAKLTHLFDNDGTVVFAIFMALWATVFLEIWKRQRARVVLHWDLYVWDEEQVRWSWQRS

SEQ ID NO: 247 - protein, 91 aa, Homo sapiens
MSRCTWPSFSFFLSSFLSFFRWSLALSARLEGSGVILAHCNLRLPGSSDSPASASQSAGITGMSRCADVHLVSIITKAHLVSWPLQMNILP

SEQ ID NO: 248 - protein, 73 aa, Homo sapiens
  SITE (33): Xaa equals any of the naturally occurring L-amino acids
  SITE (34): Xaa equals any of the naturally occurring L-amino acids
  SITE (52): Xaa equals any of the naturally occurring L-amino acids
MVFPLLCVFVLISSSLAGEEAAGLRVQKLWPAXXLSHLPVCWFHCSGIWSEXIELKVGWEGHVLPWQAHVVEF

SEQ ID NO: 249 - protein, 118 aa, Homo sapiens [sequence omitted]

SEQ ID NO: 250 - protein, 466 aa, Homo sapiens
MFGTLLLYCFFLATVPALAETGGERQLSPEKSEIWGPGLKADVVLPARYFYIQAVDTSGNKFTSSPGEKVFQVKVSAPEEQFTRVGVQVLDRKDGSFIVRYRMYASYKNLKVEVKFQGQHVAKSPYILKGPVYHENCDCPLQDSAAWLREMNCPETIAQIQRDLAHFPAVDPEKIAVEIPKRFGQRQSLCHYTLKDNKVYIKTHGEHVGFRIFMDAILLSLTRKVKMPDVELFVNLGDWPLEKKKSNSNIHPIFSWCGSTDSKDIVMPTYDLTDSVLETMGRVSLDMMSVQANTGPPWESKNSTAVWRGRDSRKERLELVKLSRKHPELIDAAFTNFFFFKHDENLYGPIVKHISFFDFFKHKYQINIDGTVAAYRLPYLLVGDSVVLKQDSIYYEHFYNELQPWKHYIPVKSNLSDLLEKLKWAKDHDEEAKKIAKAGQEFARNNLMGDDIFCYYFKLFQTKDEL

SEQ ID NO: 251 - protein, 62 aa, Homo sapiens
MTCQLLFNSFLLSSVSQIRDQIAMRESVWSGSISRQKELVTLWIICLWFRHLPLVLAVGDGW

SEQ ID NO: 252 - protein, 306 aa, Homo sapiens [sequence omitted]

SEQ ID NO: 253 - protein, 191 aa, Homo sapiens [sequence omitted]

SEQ ID NO: 254 - protein, 146 aa, Homo sapiens
MRLFVSVTVLVICLADLEEESESWDNSESEEEEKAPVLPESTEGRELTQGPAESSSLSGCGSWQPRKLPVFKSLRHMRQVGGRGTAHQELRRRANHGLSLPTRLASGPSTFKTLQEVTDSLLGGWLRAQGVGGISHRISAPLSVMT

SEQ ID NO: 255 - protein, 777 aa, Homo sapiens
MILLIILWILREIQSIYIIGIFRNPFYPKDVQTVTVFFEKQTRLMKIGIVRRILLTLVSPFAMIAFLSLDSSLQGLHSVSVCIGFTRAFRMVWQNTENALLETVIVSTVHLISSTDIWWNRSLDTGLRLLLVGIIRDRLIQFISKLQFAVTVLLTSWTEKKQRRKTTATLCILNIVFSPFVLVIIVFSTLLSSPLLPLFTLPVFLVGFPRPIQSWPGAAGTTACVCADTVYYYQMVPRLTAVLQTAMAAGSLGLLLPGSHYLGRFQDRLMWIMILECGYTYCSINIKGLELQETSCHTAEARRVDEVFEDAFEQEYTRVCSLNEHFGNVLTPCTVLPVKLYSDARNVLSGIIDSHENLKDFKGDLIKVLVWILVQYCSKRPGMKENVHNTENKGKAPLMLPALNTLPPPKSPEDIDSLNSETFNDWSDDNIFDDEPTIKKVIEEKHQLKDLPGTNLFIPGSVESQRVGDHSTGTVPENDLYKAVLLGYPAVDKGKQEDMPYIPLMEFSCSHSHLVCLPAEWRTSCMPSSKMKEMSSLFPEDWYQFVLRQLECYHSEEKASNVLEEIAKDKVLKDFYVHTVMTCYFSLFGIDNMAPSPGHILRVYGGVLPWSVALDWLTEKPELFQLALKAFRYTLKLMIDKASLGPIEDFRELIKYLEEYERDWYIGLVSDEKWKEAILQEKPYLFSLGYDSNMGIYTGRVLSLQELLIQVGKLNPEAVRGQWANLSWELLYATNDDEERYSIQAHPLLLRNLTVQAAEPPLGYPIYSSKPLHIHLY

SEQ ID NO: 256 - protein, 217 aa, Homo sapiens
MEMASSAGSWLSGCLIPLVFLRLSVHVSGHAGDAGKFHVALLGGTAELLCPLSLWPGTVPKEVRWLRSPFPQRSQAVHIFRDGKDQDEDLMPEYKGRTVLVRDAQEGSVTLQILDVRLEDQGSYRCLIQVGNLSKEDTVILQVAAPSVGSLSPSAVALAVILPVLVLLIMVCLCLIWKQRRAKEKLLYEHVTETIFFQTMLKKKENSIKLSRNSGVN

SEQ ID NO: 257 - protein, 93 aa, Homo sapiens
MSHCCSLRVDFSVPLCMLLSPLLGMSFSACQTPSKSSSDVTFSLSTPDPTPQIDLVQPSSGFPQHSVQFERSFIIVIITFFKNNFIFINLIRL

SEQ ID NO: 258 - protein, 122 aa, Homo sapiens
MLHSLALAEFCRDWQHCVPACSPTVAVLFPRVQRRFFLCALWLLRAHGGGLGSAIQDCLFYPLHCLFQQYEGTVIAHMIFGSYEGAFCVGGCQIWCSCREDNRWRLLFGHIALPPIPACFYF

SEQ ID NO: 259 - protein, 113 aa, Homo sapiens
MGAAWPRRARSWWIRTSTASSPSPSSSITLLWTPCMWAESWACCSSPTYTRTGKCSTNRTPRWPPALTSMPRTSTFQQWLSSPTFWWLVLRWGPRIGSPQTSWGCKRAQPWPG

SEQ ID NO: 260 - protein, 215 aa, Homo sapiens
MNKRAKFELRKPLVLWSLTLAVFSIFGALRTGAYMVYILMTKGLKQSVCDQGFYNGPVSKFWAYAFVLSKAPELGDTIFIILRKQKLIFLHWYHHITVLLYSWYSYKDMVAGGGWFMTMNYGVHAVMYSYYALRAAGFRVSRKFAMFITLSQITQMLMGCVVNYLVFCWMQHDQCHSHFQNIFWSSLMYLSYLVLFCHFFFEAYIGKMRKTTKAE

SEQ ID NO: 261 - protein, 84 aa, Homo sapiens
MGDKESSSSKPSLAGWVPLLLGGAFSCTPLPPRGESQQPNQTAQVVHLMETTGLKHVLYSPVYFCCYFEAWKFLFGGSWGYSSG

SEQ ID NO: 262 - protein, 116 aa, Homo sapiens
MALDISLFYLFYFFFFLRWNFSLIAQAGVQWHDLGSPQPPPPGLKRFSFLGLPSSWDYRHAPPCPANFVFLVEMGFLHVGQAGLELPTSGGPPAWASQSAGITGVSHRAWPENSHF

SEQ ID NO: 263 - protein, 139 aa, Homo sapiens
MLAMLLCMLVSVFILGVPYRGSLLILFFISSLFLLSTLGMGLLISTITRNQFNAAQVALNAAFLPSIMLSGFIFQIDSMPAVIRAVTYIIPARYFVSTLQSLFLAGNIPVVLVVNVLFLIASAVMFIGLTWLKTKRRLD

SEQ ID NO: 264 - protein, 82 aa, Homo sapiens
MGWQLRALSAVGLWFTAGDSHLSVQVCGGGPALTLWHLRSSTPTTIFPIRAPQKHVTFYQDLVRPCVSLLPPPLTLPFSPDP

SEQ ID NO: 265 - protein, 59 aa, Homo sapiens
MLCHAWLLLMYLFLEMRSHCVAQTGLELLASSHPPFSASTVAGISGTCHCALLIPFKIR

SEQ ID NO: 266 - protein, 31 aa, Homo sapiens
MIHLFLLPCPNCVFLLLHLFFQQCAASWTTS

SEQ ID NO: 267 - protein, 87 aa, Homo sapiens
MTLLLTLEVDSGTQQRAGVGSQGQAVLPGLTCFLLTFLLAASVYITQSAWDNVEVAEVTGYFMFLHGIFLFLIGRRRQKLEEMGLLS

SEQ ID NO: 268 - protein, 73 aa, Homo sapiens [sequence omitted]

SEQ ID NO: 269 - protein, 81 aa, Homo sapiens
MYSPSLYLLPSLPSLLQLSLSRSPRFNKGLQRAMEKTMKGSTIKILLYFFHHIYASLHTFIPLPNPSIFLCISKYIADIST

SEQ ID NO: 270 - protein, 52 aa, Homo sapiens
MSKKSVSYKIRYFSQAWQLMPVILVLWEAEAGGSLEARQDHIVRLCLCKKKK

SEQ ID NO: 271 - protein, 83 aa, Homo sapiens
MLCSSFLPLSTAAIWAALFSGMGAVRHSPSEGKRSLKSSRCLHFWPLPTGCSSPPPPCNVTTKNVSRCCQKSSRDGRVRLPPR

SEQ ID NO: 272 - protein, 84 aa, Homo sapiens
MGLRLPPPLCWFLCLTSTGQVPMAQARAGVQGPMDGRMPSNGCLPVSPRTPYGMPYLGALWPCWPCSWQGRSTSRHPCQQDLSG

SEQ ID NO: 273 - protein, 230 aa, Homo sapiens
MDVGPSSLPHLGLKLLLLLLLLPLRGQANTGCYGIPGMPGLPGAPGKDGYDGLPGPKGEPGIPAIPGIRGPKGQKGEPGLPGHPGKNGPMGEPGEEGRYKQKFQSVFTVTRQTHQPPAPNSLIRFNAVLTNPQGDYDTSTGKFTCKVPGLYYFVYHASHTANLCVLLYRSGVKVVTFCGHTSKTNQVNSGGVLLRLQVGEEVWLAVNDYYDMVGIQGSDSVFSGFLLFPD

SEQ ID NO: 274 - protein, 83 aa, Homo sapiens
MCAMAPLWSPLCPSICMCSVSLACVRVRVSAYASTHWALGCSQGKFDLERLSSPWNQDFLSPPHPGPVPPWLSGYWGMETLGE

SEQ ID NO: 275 - protein, 91 aa, Homo sapiens
MRPQELPRLAFPLLLLLLLLLPPPPCPAHSATRFDPTWESLDARQLPAWFDQAKFGIFIHWGVFSVPSFGSEWFWLYLVGVRIFVELECHR

SEQ ID NO: 276 - protein, 336 aa, Homo sapiens
MLETGLFFLLSWSAFLSAEAAGLTGIVAVLFCGVTQAHYTYNNLSSDSKIRTKQLFEFMNFLAENVIFCYMGLALFTFQNHIFNALFILGAFLAIFVARACNIYPLSFLLNLGRKQKIPWNFQHMMMFSGLRGAIAFALAIRNTESQPKQMMFTTTLLLVFFTVWVFGGGTTPMLTWLQIRVGVDLDENLKEDPSSQHQEANNLDKNMTKAESARLFRMWYSFDHKYLKPILTHSGPPLTTTLPEWCGPISRLLTSPQAYGEQLKEDDVECIVNQDELAINYQEQASSPCSPPARLGLDQKASPQTPGKENIYEGDLGLGGYELKLEQTLGQSQLN

SEQ ID NO: 277 - protein, 106 aa, Homo sapiens
MQWLLITPRLFYFPLLLLWLVSVKFLFIFIFGDGQGLAPSLRPECSGAIMAHHSLDFQGLSYPPTLASAGAGTTGMHHHAQLIFKFFYRDGVSLCGLGWSQTPGHK

SEQ ID NO: 278 - protein, 131 aa, Homo sapiens
MGASLCLTQLLLLLGKGGLGQASIPLVKTPAGHQAFWTRTHTHTHTHTHTKLHSRPAAVTCHQESPQLRPPPILSYEKPLLWGRRLEKVGCGGQEGPCRAGGWVWLSRCFPEGSAGIRGSCGRERAPASWL

SEQ ID NO: 279 - protein, 81 aa, Homo sapiens
MCVHTCVCMCVHTCVCVHACVWAHVCMCVCECVCWGGGMALGKVCPGWKPHSLPSAWRWACAWRPIARRLRPTGATSTVPL

SEQ ID NO: 280 - protein, 108 aa, Homo sapiens
MHPPPGVWLLHLHTPLRGFCLPLPLRSQEAVPGRGRRHLSPQLLTPHPLTSSPFVKYTQDETCTQWLTAARFVTARGGEHRTPSEGEGISTAPPPCWNETQPQGGAKL

SEQ ID NO: 281 - protein, 49 aa, Homo sapiens; identical to SEQ ID NO: 199

SEQ ID NO: 282 - protein, 187 aa, Homo sapiens
  SITE (1): Xaa equals any of the naturally occurring L-amino acids
XARDLLQALRHPKAVAFGEMGLDYSYKCTTPVPEQHKVFERQLQLAVSLKKPLVIHCREADEDLLEIMKKFVPPDYKIHRHCFTGSYPVIEPLLKYFPNMSVGFTAVLTYSSAWEAREALRQIPLERIIVETDAPYFLPRQVPKSLCQYAHPGLALHTVREIARVKDQPLSLTLAALRENTSRLYSL

SEQ ID NO: 283 - protein, 95 aa, Homo sapiens
  SITE (80): Xaa equals any of the naturally occurring L-amino acids
MVPCRKTLLFLWVGSLCRDVGSWSGWPFGLSTATQPRLRLGKQTGAGQARRACRTVILRCGSCCRGRRTGSVVAWSSLPXRTSAAELRWRPWGPV

SEQ ID NO: 284 - protein, 175 aa, Homo sapiens
  SITE (5): Xaa equals any of the naturally occurring L-amino acids
MATPXGLGALLLLLLLPTSGQEKPTEGPRNTCLGSNNMYDIFNLNDKALCFTKCRQSGSDSCNVENLQRYWLNYEAHLMKEGLTQKVNTPFLKALVQNLSTNTAEDFYFSLEPSQVPRQVMKDEDKPPDRVRLPKSLFRSLPGNRSVVRLAVTILDIGPGTLFKVRTQGSSKVKC

SEQ ID NO: 285 - protein, 126 aa, Homo sapiens
  SITE (99): Xaa equals any of the naturally occurring L-amino acids
MAAFATAHLLYVWAFGFSPLQPGLLLLIILAPGPYLSLVLQHLEPDMVLPVAAYGLILMAMLWRGLAQGGSAGWGALLFTLSDGVLAWDTFAQPLPHAXLVIMTTYYAAQLLITLSALRSPVPKTD

SEQ ID NO: 286 - protein, 187 aa, Homo sapiens; identical to SEQ ID NO: 203

SEQ ID NO: 287 - protein, 214 aa, Homo sapiens
  SITE (186): Xaa equals any of the naturally occurring L-amino acids
  SITE (188): Xaa equals any of the naturally occurring L-amino acids
  SITE (189): Xaa equals any of the naturally occurring L-amino acids
  SITE (200): Xaa equals any of the naturally occurring L-amino acids
  SITE (202): Xaa equals any of the naturally occurring L-amino acids
  SITE (203): Xaa equals any of the naturally occurring L-amino acids
  SITE (204): Xaa equals any of the naturally occurring L-amino acids
  SITE (206): Xaa equals any of the naturally occurring L-amino acids
  SITE (211): Xaa equals any of the naturally occurring L-amino acids
MSRGLLAVRGAFVGASLLFLLVNVLCAVLSHRRRAQPWALLLVRVLVSDSLFVICALSLAACLCLVARRAPSTSIYLEAKGTSVCQAAAMGGAMVLLYASRACYNLTALALAPQSRLDTFDYDWYNVSDQADLVNDLGNKGYLVFGLILFVWELLPTTLLVGFFRVHRPPQDLSTSHIPQWARSFXSXXLLLLTGAWALXKXXXAXFLGTXTRV

SEQ ID NO: 288 - protein, 254 aa, Homo sapiens
  SITE (144): Xaa equals any of the naturally occurring L-amino acids
  SITE (212): Xaa equals any of the naturally occurring L-amino acids
  SITE (214): Xaa equals any of the naturally occurring L-amino acids
  SITE (245): Xaa equals any of the naturally occurring L-amino acids
  SITE (248): Xaa equals any of the naturally occurring L-amino acids
FLLVNVLCAVLSHRRRAQPWALLLVRVLVSDSLFVICALSLAACLCLVARRAPSTSIYLEAKGTSVCQAAAMGGAMVLLYASRACYNLTALALAPQSRLDTFDYDWYNVSDQADLVNDLGNKGYLVFGLILFVWELLPTTLLVXFFRVHRPPQDLSTSHILNGQVFASRSYFFDRAGHCEDEGCSWEHSRGESTSMSGSLGSGSWYGAIGRXPXWYGGSQTKTTPLSLQCRQRTHSLSPNGPLQXPAXLLAGSV

SEQ ID NO: 289 - protein, 221 aa, Homo sapiens
  SITE (210): Xaa equals any of the naturally occurring L-amino acids
  SITE (215): Xaa equals any of the naturally occurring L-amino acids
  SITE (217): Xaa equals any of the naturally occurring L-amino acids
MGGMIIVLLICIVWFPLLFMSLIKSVAGVINQPLDVSVTITLGGYQPIFTMSAQQSQLKIMDQQSFNKFIQAFSRDTGAMQFLENYEKEDITVAELEGNSNSLWTISPPSKQKMIHELLDPNSSFSVVFSWSIQRNLSLGAKSEIATDKLSFPLKNITRKNIAKMIAGNSTESSKTPVTIEKIYPYYVKAPSDSNSKPIKQLLSENNSWXLPSFXQXHTLN

SEQ ID NO: 290 - protein, 135 aa, Homo sapiens
MAFKLLILLIGTWALFFRKRRADMPRVFVFRALLLVLIFLFVVSYWLFYGVRILDSRDRNYQGIVQYAVSLVDALLFIHYLAIVLLELRQLQPMFTLQVVPLHRWRVPLLQPGTPEYPASSIGGPRKLLQRFHHL

SEQ ID NO: 291 - protein, 295 aa, Homo sapiens
MLCCWFPWRILAAGQVPYSPHSPQVAGCDLTRCESGGARALSIQRAALVVLENYYKDFTIYNPNLLTASKFRAAKHMAGLKVYNVDGPSNNATGQSRAMIAAAARRRDSSHNELYYEEAEHERRVKKRKARLVVAVEEAFIHIQRLQAEEQQKAPGEVMDPREAAQAIFPSMARALQKYLRITRQQNYHSMESILQHLAFCITNGMTPKAFLERYLSAGPTLQYDKDRWLSTQWRLVSDEAVTNGLRDGIVFVLKCLDFSLVVNVKKIPFIILSEEFIDPKSHKFVLRLQSETSV

SEQ ID NO: 292 - protein, 85 aa, Homo sapiens [sequence omitted]

SEQ ID NO: 293 - protein, 196 aa, Homo sapiens
TQRMSGKHYKGPEVSCCIKYFIFGFNVIFWFLGITFLGIGLWAWNEKGVLSNISSITDLGGFDPVWLFLVVGGVMFILGFAGCIGALRENTFLLKFFSVFLGIIFFLELTAGVLAFVFKDWIKDQLYFFINNNIRAYRDDIDLQNLIDFTQEYIPMQVESDVAFHSPAALKIPQKMSSTLSVAMMPGKNQKLTSRL

SEQ ID NO: 294 - protein, 58 aa, Homo sapiens
  SITE (8): Xaa equals any of the naturally occurring L-amino acids
  SITE (16): Xaa equals any of the naturally occurring L-amino acids
VSLKLVIXLSWNLITXVWFHKNLTFGSWLIHWEGPSGFFNFGGSGLGKFFHLKLNLMG

SEQ ID NO: 295 - protein, 133 aa, Homo sapiens
MHGARLFVCLFVCFRQSCYVAQAGVQWHNHSSLQPLSPGFKRFFCLNLPSSWDYRHMATCPWLIFVFLVEMEFRHVGQAGLGLLTSSDLPALAFQSAGITGLSHHAWPGRFLKKVIEICSCPVPRGSHAGLFS

SEQ ID NO: 296 - protein, 74 aa, Homo sapiens
SKTGIVLQTFRAEFQELKSEKQQAAFPKRYTCFGHQRRTELRAAVENLKHSAEFLSAPLANKLKCQTALAAGYF

SEQ ID NO: 297 - protein, 133 aa, Homo sapiens
  SITE (34): Xaa equals any of the naturally occurring L-amino acids
  SITE (60): Xaa equals any of the naturally occurring L-amino acids
  SITE (69): Xaa equals any of the naturally occurring L-amino acids
  SITE (96): Xaa equals any of the naturally occurring L-amino acids
MAPAGCCCCCCFWGGAVAAAGAARRVLLLLLLGXLSARLRPGALATEHYSPLALLKQELXHRQQQEAPXGGGGCSPQSGDWGDQYSAECGESSFLXFHDSDCEPQGSSPCDSLLSLNTAKILSQAKSIAEQKR

SEQ ID NO: 298 - protein, 108 aa, Homo sapiens
  SITE (89): Xaa equals any of the naturally occurring L-amino acids
  SITE (91): Xaa equals any of the naturally occurring L-amino acids
  SITE (102): Xaa equals any of the naturally occurring L-amino acids
  SITE (106): Xaa equals any of the naturally occurring L-amino acids
MTSQNLWVIVVIANSILVIVAQYRDEGNRFCNQMILGSESTLPLTSYMTSSNFHHLSMLQFPHRQDGCGGRGTTVQIHHPKFKMLQNLXRXWWLIPVIPALXEVKXDG

SEQ ID NO: 299 - protein, 68 aa, Homo sapiens
  SITE (19): Xaa equals any of the naturally occurring L-amino acids
NFLEPKCDATSGKFHNSSXVIDCSGNAGTHHEVYSASSKEIPVSSYISFSHMPDRYLSSFTVRYFCVE

SEQ ID NO: 300 - protein, 194 aa, Homo sapiens
  SITE (168): Xaa equals any of the naturally occurring L-amino acids
MMWLLLTTTCLICGTLNAGGFLDLENEVNPEVWMNTSEIIIYNGYPSEEYEVTTEDGYILLVNRIPYGRTHARSTGPRPVVYMQHALFADNAYWLENYANGSLGFLLADAGYDVWMGNSRGNTWSRRHKTLSETDEKFWAFSFDEMAKYDLPGVIDFIVNKTGQEKLXFIGHSLGTTIGFVAFSPCLNWHKESK

SEQ ID NO: 301 - protein, 87 aa, Homo sapiens; identical to SEQ ID NO: 212

SEQ ID NO: 302 - protein, 90 aa, Homo sapiens; identical to SEQ ID NO: 213

SEQ ID NO: 303 - protein, 34 aa, Homo sapiens; identical to SEQ ID NO: 214

SEQ ID NO: 304 - protein, 47 aa, Homo sapiens
  SITE (31): Xaa equals any of the naturally occurring L-amino acids
  SITE (32): Xaa equals any of the naturally occurring L-amino acids
HTFSNCLLERLYQARCSCLMPVILALWEAEXXGQLELRSSRPAWATW

SEQ ID NO: 305 - protein, 245 aa, Homo sapiens; identical to SEQ ID NO: 215

SEQ ID NO: 306 - protein, 140 aa, Homo sapiens
MFPLHLAVLFGFSDCCRKLLSSGQLYSIVSSLSNEHVLSAGFDINTPDNLGRTCLHAAASGGNVECLNLLLSSGADLRRRDKFGRTPLHYAAANGSYQCAVTLVTAGAGVNEADCKGCSPLHYAAASDTYRRAEPHTPSS

SEQ ID NO: 307 - protein, 110 aa, Homo sapiens; identical to SEQ ID NO: 217

SEQ ID NO: 308 - protein, 107 aa, Homo sapiens; identical to SEQ ID NO: 218

SEQ ID NO: 309 - protein, 251 aa, Homo sapiens
MGPPPGAGVSCRGGCGFSRLLAWCFLLALSPQAPGSRGAEAVWTAYLNVSWRVPHTGVNRTVWELSEEGVYGQDSPLEPVAGVLVPPDGPGALNACNPHTNFTVPTVWGSTVQVSWLALIQRGGGCTFADKIHLAYERGASGAVIFNFPGTRNEVIPMSHPGAVDIVAIMIGNLKGTKILQSIQRGIQVTMVIEVGKKHGPWVNHYSIFFRFCVLFYYYGGNCGLFYLLFCSKATECKSSKQEAEAIKGRC

SEQ ID NO: 310 - protein, 124 aa, Homo sapiens
  SITE (78): Xaa equals any of the naturally occurring L-amino acids
  SITE (108): Xaa equals any of the naturally occurring L-amino acids
  SITE (111): Xaa equals any of the naturally occurring L-amino acids
MLTQSQQVLRGILLFLQNILQVSWGSPLALASPPSPSLQPGNGLASSLLALQPGLAGPWAGPQEPSPAMCFPKKRSLXPNLRKQWASIHINDPRGTLCPRCTGCNQRXSGXSGLIWRDRFYHHP

SEQ ID NO: 311 - protein, 87 aa, Homo sapiens [sequence omitted]

SEQ ID NO: 312 - protein, 84 aa, Homo sapiens; identical to SEQ ID NO: 222

SEQ ID NO: 313 - protein, 71 aa, Homo sapiens
  SITE (4): Xaa equals any of the naturally occurring L-amino acids
  SITE (10): Xaa equals any of the naturally occurring L-amino acids
LPGXCFNHLXINFWKKIIIFTLKFPYSKYSISVWQMDEWADIIGSYHVDYEEVQSIQNKNTKHSNKPRVCQ

SEQ ID NO: 314 - protein, 142 aa, Homo sapiens [sequence omitted]

SEQ ID NO: 315 - protein, 84 aa, Homo sapiens
  SITE (19): Xaa equals any of the naturally occurring L-amino acids
MFLSGKPGESYLSHLPCLXFFFFFFGWSCCLDDAFTMQERVFVKDIFEDWLFHIVLHSLTVAKCTVDFHDHCIFLVIEMYLLCF

SEQ ID NO: 316 - protein, 88 aa, Homo sapiens
  SITE (62): Xaa equals any of the naturally occurring L-amino acids
MFPILSITTLSILAFFLWLSVTSHFYRQKTGFHHSPSFYLIVQIWDTYADIVASEYVFPWRXTLSSREQCLSVVPVAFSLIDFISKVS

SEQ ID NO: 317 - protein, 127 aa, Homo sapiens; identical to SEQ ID NO: 227

SEQ ID NO: 318 - protein, 83 aa, Homo sapiens; identical to SEQ ID NO: 228

SEQ ID NO: 319 - protein, 86 aa, Homo sapiens
  SITE (64): Xaa equals any of the naturally occurring L-amino acids
  SITE (66): Xaa equals any of the naturally occurring L-amino acids
  SITE (75): Xaa equals any of the naturally occurring L-amino acids
MAKAPFYHLLFCFGIWSDSYSSLGLAQWRNWCSYCTGLCTPCNCDVYDCSSCFPILHFQSPRAXLXRITSTVNHXRDCTTRHVGGK

SEQ ID NO: 320 - protein, 70 aa, Homo sapiens
  SITE (2): Xaa equals any of the naturally occurring L-amino acids
  SITE (13): Xaa equals any of the naturally occurring L-amino acids
  SITE (21): Xaa equals any of the naturally occurring L-amino acids
  SITE (22): Xaa equals any of the naturally occurring L-amino acids
IXGEPRFLGTMPXLEFGSPPXXFQAGPELPENNSGQLTTSDSSPPNMAYPCSSDVILVASVNSVCHAVQT

SEQ ID NO: 321 - protein, 81 aa, Homo sapiens
  SITE (40): Xaa equals any of the naturally occurring L-amino acids
  SITE (42): Xaa equals any of the naturally occurring L-amino acids
  SITE (53): Xaa equals any of the naturally occurring L-amino acids
MRWRKPLCLWCLLTQGETEAQAGQPLAWGGGWVVLRPVTXPXQHPPVDPLPAXARPESCSQAQTLACPSGDAGQYSSLQPS

SEQ ID NO: 322 - protein, 2 aa, Homo sapiens
RA

SEQ ID NO: 323 - protein, 138 aa, Homo sapiens
  SITE (137): Xaa equals any of the naturally occurring L-amino acids
MTSGPRGVVHFYGYSVVSTLALLVSIAFPIPICQQWEPSYKRVKALSIVGGDPHLILLASTTVLVGAIVSTVQNFLFWHMKDHGSGELVMGFSVALSLLGEILLHPFKATLLRKLSRTGLVGLGLSCLAGQLLYYSXL

SEQ ID NO: 324 - protein, 124 aa, Homo sapiens
  SITE (66): Xaa equals any of the naturally occurring L-amino acids
  SITE (102): Xaa equals any of the naturally occurring L-amino acids
  SITE (104): Xaa equals any of the naturally occurring L-amino acids
  SITE (106): Xaa equals any of the naturally occurring L-amino acids
  SITE (109): Xaa equals any of the naturally occurring L-amino acids
  SITE (111): Xaa equals any of the naturally occurring L-amino acids
  SITE (114): Xaa equals any of the naturally occurring L-amino acids
  SITE (115): Xaa equals any of the naturally occurring L-amino acids
  SITE (122): Xaa equals any of the naturally occurring L-amino acids
MASPAPACLGSLLSWTVCGWGEVVSGPPCAVSAWGCSWATWVTPSVVVQLAPSGAVQTPLSPELLXISFQLHAAPLGQFYFPILQMGKEKLRLRNMPKEAPXPXFXLFXLXLRXXLCHPGWXAG

SEQ ID NO: 325 - protein, 82 aa, Homo sapiens
  SITE (63): Xaa equals any of the naturally occurring L-amino acids
  SITE (75): Xaa equals any of the naturally occurring L-amino acids
  SITE (76): Xaa equals any of the naturally occurring L-amino acids
  SITE (77): Xaa equals any of the naturally occurring L-amino acids
MGQLCHSPSCLPSGAFCLLLSSVLGIIVLNSTDTISSSHPPLSSNLPSWGYTTTKAHLSLGLXGFAGKENMKELXXXSSRSF

SEQ ID NO: 326 - protein, 248 aa, Homo sapiens
  SITE (51): Xaa equals any of the naturally occurring L-amino acids
MTLLSLLGRIMRYFLLRPETLFLLCISLALWSYFFHTDEVKTIVKSSRDAXKMVKGKVAEIMQNDRLGGLDVLEAEFSKTWEFKNHNVAVYSIQGRRDHMEDRFEVLTDLANKTHPSIFGIFDGHGGETAAEYVKSRLPEALKQHLQDYEKDKENSVLSYQTILEQQILSIDREMLEKLTVSYDEAGTTCLIALLSDKDLTVANVGDSRGVLCDKDGNAIPLSHDHKPYQLKERKRIKRAGGFISFNG

SEQ ID NO: 327 - protein, 27 aa, Homo sapiens
FLIALDLLNVFCLLLSVFSLEIECKPY

SEQ ID NO: 328 - protein, 51 aa, Homo sapiens
MKSKFCFASPMRLPKALLAFSACWQLLSAWLLHLSPHTAYKSEKVSRIKAK

SEQ ID NO: 329 - protein, 33 aa, Homo sapiens
  SITE (20): Xaa equals any of the naturally occurring L-amino acids
MPNSLLGVFFCFVLFCFVLXCLIQSFTLSPRLE

SEQ ID NO: 330 - protein, 99 aa, Homo sapiens
  SITE (4): Xaa equals any of the naturally occurring L-amino acids
  SITE (9): Xaa equals any of the naturally occurring L-amino acids
  SITE (16): Xaa equals any of the naturally occurring L-amino acids
  SITE (86): Xaa equals any of the naturally occurring L-amino acids
QKAXWSQLXPIYLTVXIFQRQFQGYYSHDSTHPQGVRFSLCKCIMTFYNTPCHALFYPARIGVWPQLVPTSSTAITSSSSAPSVVXEPLVSSEMHMLKS

SEQ ID NO: 331 - protein, 35 aa, Homo sapiens; identical to SEQ ID NO: 239

SEQ ID NO: 332 - protein, 262 aa, Homo sapiens
  SITE (154): Xaa equals any of the naturally occurring L-amino acids
HGPPEGAVGCQREQQRQAAAQPRQHQAIRSVGRQPVVCCPQTLDAGLGPGHAAVARPLLRPLQVGEAECGHGQQGGQDPAGSAHGPGVLGSQVASGEEGVHDAQVAVEADAGDEDDAAQQVAGEEEALQAARGLPIAPVLGGIEVGGQRGQRQXAEQVADCQLDREDHGGVPWALLPDAEAVQGQAIAGHGHQELNHQYGPQEVPLEPTEFVVGSCQEVGRAGLGTRDVGCHAPVPILSLCLLPSSPAPPPVTSGLVGPAPA

SEQ ID NO: 333 - protein, 82 aa, Homo sapiens; identical to SEQ ID NO: 240

SEQ ID NO: 334 - protein, 587 aa, Homo sapiens
MRPRGLPPLLVVLLGCWASVSAQTDATPAVTTEGLNSTEAALATFGTFPSTRPPGTPRAPGPSSGPRPTPVTDVAVLCVCDLSPAQCDINCCCDPDCSSVDFSVFSACSVPVVTGDSQFCSQKAVIYSLNFTANPPQRVFELVDQINPSIFCIHITNYKPALSFINPEVPDENNFDTLMKTSDGFTLNAESYVSFTTKLDIPTAAKYEYGVPLQTSDSFLRFPSSLTSSLCTDNNPAAFLVNQAVKCTRKINLEQCEEIEALSMAFYSSPEILRVPDSRKKVPITVQSIVIQSLNKTLTRREDTDVLQPTLVNAGHFSLCVNVVLEVKYSLTYTDAGEVTKADLSFVLGTVSSVVVPLQQKFEIHFLQENTQPVPLSGNPGYVVGLPLAAGFQPHKGSGIIQTTNRYGQLTILHSTTEQDCLALEGVRTPVLFGYTMQSGCKLRLTGALPCQLVAQKVKSLLWGQGFPDYVAPFGNSQAQDMLDWVPIHFITQSFNRKDSCQLPGALVIEVKWTKYGSLLNPQAKIVNVTANLISSSFPEANSGNERTILISTAVTFVDVSAPAEAGFRAPPAINARLPFNFFFPFV

SEQ ID NO: 335 - protein, 337 aa, Homo sapiens
  SITE (173): Xaa equals any of the naturally occurring L-amino acids
  SITE (255): Xaa equals any of the naturally occurring L-amino acids
  SITE (320): Xaa equals any of the naturally occurring L-amino acids
MGLIVVLLFPNLCMCTFHAGGFQCVLWMAGLKRRVPLHSLRYFISMVGLFSKPGLLPWYARNPPGWSQLFLGTVCKGDFTRVIATKCQKGQKSQKKPSHLGPLDGSWQERLADVVTPLWRLSYEEQLKVKFAAQKKILQRLESYIQMLNGVSVTTAVPKSERLSCLLHPIIPXPVINGYRNKSTFSVNRGPDGNPKTVGFYLGTWRDGNVVCVQSNHLKNIPEKHSQVAQYYEVFLRQSPLEPCLVFHEGGYWRXLTVRTNSQGHTMAIITFHPQKLSQEELHVQKEIVKEFFIKRSWSSLWLDLTLLPGKYHDPLQPSXVSLSSFCLGNLHLLKNF

SEQ ID NO: 336 - protein, 125 aa, Homo sapiens [sequence omitted]

SEQ ID NO: 337 - protein, 132 aa, Homo sapiens; identical to SEQ ID NO: 244

SEQ ID NO: 338 - protein, 81 aa, Homo sapiens
MRLLVLSSLLCILLLCFSIFSTEGKRRPAKAWSGRRTRLCCHRVPSPNSTNLKGHHVRLCKPCKLEPEPRLWVVPGALPQV

SEQ ID NO: 339 - protein, 173 aa, Homo sapiens
  SITE (128): Xaa equals any of the naturally occurring L-amino acids
  SITE (153): Xaa equals any of the naturally occurring L-amino acids
  SITE (160): Xaa equals any of the naturally occurring L-amino acids
  SITE (166): Xaa equals any of the naturally occurring L-amino acids
MSGLSRPLLLAVGCLAALCVITAAGNTTLAPNVTTASSPPPTTTTVPVSPTTLSPLPVTTPAPDICGSRNSCVSCVDGNATCFWIECKGKSYCSDNSTAGDCKVVNTTGFCSAKTTTLPSTTTTSTTXTTSGTTNTTLSPTIQPTRKSTFDAXQFHWRNXPCLGVXAVIFFLY

SEQ ID NO: 340 - protein, 91 aa, Homo sapiens; identical to SEQ ID NO: 247

SEQ ID NO: 341 - protein, 139 aa, Homo sapiens
  SITE (23): Xaa equals any of the naturally occurring L-amino acids
PPRPGCPVPQWGCSSAWPCPSQXHHHPANDCQTVGRHSPLDLNLKSPSLPWLDPGDPFALPSAPSPTDLLCDLRPVCRPLWASVFPAMKTAISQSCVKQKRKAGGRPWANGRALVIINIVAAVVLLLLINIHIIYFILT

SEQ ID NO: 342 - protein, 86 aa, Homo sapiens
  SITE (34): Xaa equals any of the naturally occurring L-amino acids
  SITE (63): Xaa equals any of the naturally occurring L-amino acids
  SITE (71): Xaa equals any of the naturally occurring L-amino acids
  SITE (82): Xaa equals any of the naturally occurring L-amino acids
MVFPLLCVFVLISSSLAGEEAAGLRVQKLWPAVXLSHLPVCWFHCSGIWSEVIELKVGWEGHXLPWQAHVXEFKVVEHLISXMGAG

SEQ ID NO: 343 - protein, 118 aa, Homo sapiens [sequence omitted]

SEQ ID NO: 344 - protein, 365 aa, Homo sapiens
  SITE (189): Xaa equals any of the naturally occurring L-amino acids
  SITE (253): Xaa equals any of the naturally occurring L-amino acids
  SITE (365): Xaa equals any of the naturally occurring L-amino acids
MFGTLLLYCFFLATVPALAETGGERQLSPEKSEIWGPGLKADVVLPARYFYIQAVDTSGNKFTSSPGEKVFQVKVSAPEEQFTRVGVQVLDRKDGSFIVRYRMYASYKNLKVEVKFQGQHVAKSPYILKGPVYHENCDCPLQDSAAWLREMNCPETIAQIQRDLAHFPAVDPEKIAVEIPKRFGQRQSXCHYTLKDNKVYIKTHGEHVGFRIFMDAILLSLTRKVKMPDVELFVNLGDWPLEKKKSNSNIHPXFSWCGSTDSKDIVMPTYDLTDSVLETMGRVSLDMMSVQANTGPPWESKNSTAVWRGRDSRKERLELVKLSRKHPELIDAAFTNFFFFKHDENLYGPIVNIFHFLISSSISIX

SEQ ID NO: 345 - protein, 62 aa, Homo sapiens
  SITE (3): Xaa equals any of the naturally occurring L-amino acids
MTXQLLFNSFLLSSVSQIRDQIAMRESVWSGSISRQKELVTLWIICLWFRHLPLVLAVGDGW

SEQ ID NO: 346 - protein, 18 aa, Homo sapiens
  SITE (8): Xaa equals any of the naturally occurring L-amino acids
CPALFNIXFENSILYCQI

SEQ ID NO: 347 - protein, 306 aa, Homo sapiens [sequence omitted]

SEQ ID NO: 348 - protein, 106 aa, Homo sapiens
  SITE (94): Xaa equals any of the naturally occurring L-amino acids
  SITE (102): Xaa equals any of the naturally occurring L-amino acids
  SITE (106): Xaa equals any of the naturally occurring L-amino acids
MGWSRGEGQQGWLAAALCGWTRLGKAEGSEGWATLEGCQVPSLLQGNEGGAALNRHMPKQGIDAWIKLATTRRSLFGIFQILRHPSCDDGVERXTGPLEFCXLHRX

SEQ ID NO: 349 - protein, 137 aa, Homo sapiens
ALMSRQRGPGENPAPSVIPLHFLPSFLLCLAKEGSSLGCPYNAPGPRLSNKKPEPCGPVARASSGRLPLLCLGPLSPASRARVRLQASGHCPGCDGTKAGGAPGTTQLGFPPGFPAGVSGSFSPALLGVCRNWPCSP

SEQ ID NO: 350 - protein, 102 aa, Homo sapiens
  SITE (11): Xaa equals any of the naturally occurring L-amino acids
  SITE (56): Xaa equals any of the naturally occurring L-amino acids
ETRTLQPPGPXCVCRPVATVRAVMAPRQVEHQVPHSWASHQAFPRGSQGASPQRCXESAGTGLVLLSPSLHTVLGEDGCGRCPCREVTVEVAVACSHLWEEK

SEQ ID NO: 351 - protein, 133 aa, Homo sapiens
  SITE (131): Xaa equals any of the naturally occurring L-amino acids
MRLFVSVTVLVICLADLEEESESWDNSESEEEEKAPVLPESTEGRELTQGPAESSSLSGCGSWQPRKLPVFKSLRHMRQVGGRGTAHQELRRRANHGLSLPTRLASGPSTFKTLQEVTDSLLGGWLRAQGXGG

SEQ ID NO: 352 - protein, 136 aa, Homo sapiens
  SITE (96): Xaa equals any of the naturally occurring L-amino acids
  SITE (98): Xaa equals any of the naturally occurring L-amino acids
MILLIILWILREIQSIYIIGIFRNPFYPKDVQTVTVFFEKQTRLMKIGIVRRILLTLVSPFAMIAFLSLDSSLQGLHSVSVCIGFTRAFRMVWQNXEXALLETVIVSTVHLISSTDIWWNRSLDTGLRLLLVGIHT

SEQ ID NO: 353 - protein, 134 aa, Homo sapiens
  SITE (45): Xaa equals any of the naturally occurring L-amino acids
  SITE (133): Xaa equals any of the naturally occurring L-amino acids
MILLIILWILREIQSIYIIGIFRNPFYPKDVQTVTVFFEKQTRLXKIGIVRRILLTLVSPFAMIAFLSLDSSLQGLHSVSVCIGFTRAFRMVWQNTENALLETVIVSTVHLISSTDIWWNRSLDTGGTHFVNXV

SEQ ID NO: 354 - protein, 303 aa, Homo sapiens
GRLRGAGRGVQRAMAALRVLLSCARGPLRPPVRCPAWRPFASGANFEYIIAEKRGKNNTVGLIQLNRPKALNALCDGLIDELNQALKIFEEDPAVGAIVLTGGDKAFAAGADIKEMQNLSFQDCYSSKFLKHWDHLTQVKKPVIAAVNGYAFGGGCELAMMCDIIYAGEKAQFAQPEILIGTIPGAGGTQRLTRAVGKSLAMEMVLTGDRISAQDAKQAGLVSKICPVETLVEEAIQCAEKIASNSKIVVAMAKESVNAAFEMTLTEGSKLEKKLFYSTFATDDRKEGMTAFVEKRKANFKDQ

SEQ ID NO: 355 - protein, 118 aa, Homo sapiens
  SITE (62): Xaa equals any of the naturally occurring L-amino acids
MEMASSAGSWLSGCLIPLVFLRLSVHVSGHAGDAGKFHVALLGGTAELLCPLSLWPGTVPKXVRWLRSPFPQRSQAVHIFRDGKDQDEDLMPEYKGRTVLVRDAQEGSVTLQILDVRL

SEQ ID NO: 356 - protein, 93 aa, Homo sapiens
  SITE (75): Xaa equals any of the naturally occurring L-amino acids
MSHCCSLRVDFSVPLCMLLSPLLGMSFSACQTPSKSSSDVTFSLSTPDPTPQIDLVQPSSGFPQHSVQFERSFIXVIITFFKNNFIFINLIRL

SEQ ID NO: 357 - protein, 122 aa, Homo sapiens; identical to SEQ ID NO: 258

SEQ ID NO: 358 - protein, 95 aa, Homo sapiens
MGAAWPRRARSWWIRTSTASSPSPSSSITLLWTPCMWAESWACCSSPTYTRTGKCSTNRTPRWPPALTSMPRTSTFQQWLSSPTFWWLACAGDPG

SEQ ID NO: 359 - protein, 129 aa, Homo sapiens
  SITE (52): Xaa equals any of the naturally occurring L-amino acids
  SITE (110): Xaa equals any of the naturally occurring L-amino acids
MNKRAKFELRKPLVLWSLTLAVFSIFGALRTGAYMVYILMTKGLKQSVCDQXFYNGPVSKFWAYAFVLSKAPELGDTIFIILRKQKLIFLHWYHHITVLLYSWYSYKDMXCRGGWFMTMNYGVHAVMYS

SEQ ID NO: 360 - protein, 84 aa, Homo sapiens; identical to SEQ ID NO: 261

SEQ ID NO: 361 - protein, 88 aa, Homo sapiens
  SITE (11): Xaa equals any of the naturally occurring L-amino acids
  SITE (19): Xaa equals any of the naturally occurring L-amino acids
  SITE (23): Xaa equals any of the naturally occurring L-amino acids
  SITE (56): Xaa equals any of the naturally occurring L-amino acids
  SITE (57): Xaa equals any of the naturally occurring L-amino acids
TSNVNAQNHQXPTHLRVNXYDVXFGVNVGNETAMKAPELKDVGKWAAVHCPALQGXXEACLLASGGGARLQEGPATCHLPCDQAKKWN

SEQ ID NO: 362 - protein, 116 aa, Homo sapiens
  SITE (11): Xaa equals any of the naturally occurring L-amino acids
MALDISLFYLXYFFFFLRWNFSLIAQAGVQWHDLGSPQPPPPGLKRFSFLGLPSSWDYRHAPPCPANFVFLVEMGFLHVGQAGLELPTSGGPPAWASQSAGITGVSHRAWPENSHF

SEQ ID NO: 363 - protein, 139 aa, Homo sapiens; identical to SEQ ID NO: 263

SEQ ID NO: 364 - protein, 82 aa, Homo sapiens; identical to SEQ ID NO: 264

SEQ ID NO: 365 - protein, 59 aa, Homo sapiens; identical to SEQ ID NO: 265

SEQ ID NO: 366 - protein, 101 aa, Homo sapiens
  SITE (8): Xaa equals any of the naturally occurring L-amino acids
  SITE (100): Xaa equals any of the naturally occurring L-amino acids
MDHMASDXLERLLVAMVFPCAQEVENEIGFGEHLALARSQPPDFKATFLKPKVVVGQVWWLMCVIPALWETERVDHLRSRAQDQPAQCGKTPSLLKIQTXN

SEQ ID NO: 367 - protein, 31 aa, Homo sapiens; identical to SEQ ID NO: 266

SEQ ID NO: 368 - protein, 118 aa, Homo sapiens
  SITE (34): Xaa equals any of the naturally occurring L-amino acids
ANTSTRAALYCLFLSFIMFASVLQINPRSWLMKXVITVLAACLESENQNAQRIGAAALWALIYNYQKAKTALKSPSVKRRVDEAYSLAKKTFPNSEANPLNAYYLKCLENLVQLLNSS

SEQ ID NO: 369 - protein, 87 aa, Homo sapiens [sequence omitted]

SEQ ID NO: 370 - protein, 73 aa, Homo sapiens [sequence omitted]

SEQ ID NO: 371 - protein, 81 aa, Homo sapiens; identical to SEQ ID NO: 269

SEQ ID NO: 372 - protein, 61 aa, Homo sapiens
  SITE (6): Xaa equals any of the naturally occurring L-amino acids
  SITE (43): Xaa equals any of the naturally occurring L-amino acids
MSKKSXSYKIRYFSQAWQLMPVILVLWEAEAGGSLEARQDHIXRLCLCKKKKRAAPLFFFF

SEQ ID NO: 373 - protein, 83 aa, Homo sapiens; identical to SEQ ID NO: 271

SEQ ID NO: 374 - protein, 84 aa, Homo sapiens; identical to SEQ ID NO: 272

SEQ ID NO: 375 - protein, 143 aa, Homo sapiens
  SITE (97): Xaa equals any of the naturally occurring L-amino acids
  SITE (99): Xaa equals any of the naturally occurring L-amino acids
  SITE (104): Xaa equals any of the naturally occurring L-amino acids
  SITE (107): Xaa equals any of the naturally occurring L-amino acids
MDVGPSSLPHLGLKLLLLLLLLPLRGQANTGCYGIPGMPGLPGAPGKDGYDGLPGPKGEPGIPAIPGIRGPKGQKGEPGLPGHPGKNGPMGPPGMPXVXGPMGXPGXPEIPVSVHGHSADPPAPCTQQPDQIQRGPHQPAGRL

SEQ ID NO: 376 - protein, 245 aa, Homo sapiens
MDVGPSSLPHLGLKLLLLLLLLPLRGQANTGCYGIPGMPGLPGAPGKDGYDGLPGPKGEPGIPAIPGIRGPKGQKGEPGLPGHPGKNGPMGPPGMPGVPGPMGIPGEPGEEGRYKQKFQSVFTVTRQTHQPPAPNSLIRFNAVLTNPQGDYDTSTGKFTCKVPGLYYFVYHASHTANLCVLLYRSGVKVVTFCGHTSKTNQVNSGGVLLRLQVGEEVWLAVNDYYDMVGIQGSDSVFSGFLLFPD

SEQ ID NO: 377 - protein, 83 aa, Homo sapiens; identical to SEQ ID NO: 274

SEQ ID NO: 378 - protein, 91 aa, Homo sapiens; identical to SEQ ID NO: 275

SEQ ID NO: 379 - protein, 336 aa, Homo sapiens; identical to SEQ ID NO: 276

SEQ ID NO: 380 - protein, 72 aa, Homo sapiens
  SITE (5): Xaa equals any of the naturally occurring L-amino acids
  SITE (19): Xaa equals any of the naturally occurring L-amino acids
  SITE (23): Xaa equals any of the naturally occurring L-amino acids
  SITE (25): Xaa equals any of the naturally occurring L-amino acids
  SITE (27): Xaa equals any of the naturally occurring L-amino acids
  SITE (32): Xaa equals any of the naturally occurring L-amino acids
  SITE (33): Xaa equals any of the naturally occurring L-amino acids
  SITE (35): Xaa equals any of the naturally occurring L-amino acids
  SITE (40): Xaa equals any of the naturally occurring L-amino acids
  SITE (42): Xaa equals any of the naturally occurring L-amino acids
  SITE (47): Xaa equals any of the naturally occurring L-amino acids
  SITE (50): Xaa equals any of the naturally occurring L-amino acids
  SITE (51): Xaa equals any of the naturally occurring L-amino acids
  SITE (55): Xaa equals any of the naturally occurring L-amino acids
  SITE (68): Xaa equals any of the naturally occurring L-amino acids
MQWLXITPRLFYFPLLLLXLGSXKXLXISILXXGXVLLHXSXRMHGXNMXXQSLXFKVKLSSPLPSQXLGLR

SEQ ID NO: 381 - protein, 75 aa, Homo sapiens
MGASLCLTQLLLLLGKGGLGQASIPLVKTPAGHQAFWTRTHTHTHTHTHKTSQQASCSDLSSRVTSAAPPSHPFL

SEQ ID NO: 382 - protein, 81 aa, Homo sapiens
  SITE (77): Xaa equals any of the naturally occurring L-amino acids
MCVHTCVCMCVHTCVCVHACVWAHVCMCVCECVCWGGGMALGKVCPGWKPHSLPSAWRWACAWRPIARRLRPTGATXTVPL

SEQ ID NO: 383 - protein, 117 aa, Homo sapiens
  SITE (116): Xaa equals any of the naturally occurring L-amino acids
MHPPPGVWLLHLHTPLRGFCLPLPLRSQEAVPGRGRRHLSPQLLTPHPLTSSPFVKYTQDETCTQWLTAARFVTARGGEHRTPSEGEGISTAPPPCWNETQPQGGATSDPGHSADXP

SEQ ID NO: 384 - protein, 167 aa, Homo sapiens
PGPGSCLLHLSSQNLWQPEFFNSLSLSLHQLHSRINRKVAARPAGPLVSLPLHLGVSQPLPGSPQEAMAPLAFVCLSGGADSRGTCPSAAEWPPCPAKPDVHSPGAPPPPLSCPGPWGTNSPISTRALAHHHGTLPPRPSPPLLCPSWPHLASPGGELSPAVPTLPP

SEQ ID NO: 385 - protein, 277 aa, Homo sapiens
RRVVIDPQEKPSEEPLGDRRTVIDKCSPPLEFLDDSDSHLEIQKHKDREVVMEHPSSGSDWSDVEEISTVRFSQEEPVSLKPSAVPEPSSFTTDYVMYPPHLYSSPWCDYASYWTSSPKPSSYPSTGSSSNDAAQVGKSSRSRMSDYSPNSTGSVQNTSRDMEASEEGWSQNSRSFRFSRSSEEREVKEKRTFQEEMPPRPCGGHASSSLPKSHLEPSLEEGFIDTHCHLDMLYSKLSFQGTFTKFRKIYSSSFPKEFQGCISDFCVRGGKAEMTWK

SEQ ID NO: 386 - protein, 172 aa, Homo sapiens
  SITE (153): Xaa equals any of the naturally occurring L-amino acids
WFAALVKCLPVLCLAGFLWVMSPSGGYTQLLQGALVCSAVGDACLIWPAAFVPGMAAFATAHLLYVWAFGFSPLQPGLLLLIILAPGPYLSLVLQHLEPDMVLPVAAYGLILMAMLWRGLAQGGSAGWGALLFTLSDGVLAWDTFAQPLPHAXLVIMTTYYAAQLLITLSAL

SEQ ID NO: 387 - protein, 156 aa, Homo sapiens
RPGADCEVCKEFLNRFYKSLIDRGVNFSLDTIEKELISFCLDTKGKENRLCYYLGATKDAATKILSEVTRPMSVHMPAMKICEKLKKLDSQICELKYEKTLDLASVDLRKMRVAELKQILHSWGEECRACAEKTDYVNLIQELAPKYAATHPKTEL

SEQ ID NO: 388 - protein, 268 aa, Homo sapiens
FFSVYAQLWLVLLYGHKRLSYQTVFLALCLLWAALRTTLFSFYFRDTPRANRLGPLPFWLLYCCPVCLQFFTLTLMNLYFAQVVFKAKVKRRPEMSRGLLAVRGAFVGASLLFLLVNVLCAVLSHRRRAQPWALLLVRVLVSDSLFVICALSLAACLCLVARRAPSTSIYLEAKGTSVCQAAAMGGAMVLLYASRACYNLTALALAPQSRLDTFDYDWYNVSDQADLVNDLGNKGYLVFGLILFVWELLPTTLLVGFFRVHRPPQDLS

SEQ ID NO: 389 - protein, 222 aa, Homo sapiens
SEKRYPQPRGQKKKKVVKYGMGGMIIVLLICIVWFPLLFMSLIKSVAGVINQPLDVSVTITLGGYQPIFTMSAQQSQLKIMDQQSFNKFIQAFSRDTGAMQFLENYEKEDITVAELEGNSNSLWTISPPSKQKMIHELLDPNSSFSVVFSWSIQRNLSLGAKSEIATDKLSFPLKNITRKNIAKMIAGNSTESSKTPVTIEKIYPYYVKAPSDSNSKPIKQL

SEQ ID NO: 390 - protein, 267 aa, Homo sapiens
TDGESRFYSLGHLSIQRAALVVLENYYKDFTIYNPNLLTASKFRAAKHMAGLKVYNVDGPSNNATGQSRAMIAAAARRRDSSHNELYYEEAEHERRVKKRKARLVVAVEEAFIHIQRLQAEEQQKAPGEVMDPREAAQAIFPSMARALQKYLRITRQQNYHSMESILQHLAFCITNGMTPKAFLERYLSAGPTLQYDKDRWLSTQWRLVSDEALTNGLRDGIVFVLKCLDFSLVVNVKKIPFIILSEEFIDPKSHKFVLRLQSETSV

SEQ ID NO: 391 - protein, 97 aa, Homo sapiens
QSCYVAQAGVQWHNHSSLQPLSPGFKRFFCLNLPSSWDYRHMATCPWLIFVFLVEMEFRHVGQAGLGLLTSSDLPALAFQSAGITGLSHHAWPGRFL

SEQ ID NO: 392 - protein, 44 aa, Homo sapiens
  SITE (16): Xaa equals any of the naturally occurring L-amino acids
  SITE (28): Xaa equals any of the naturally occurring L-amino acids
  SITE (43): Xaa equals any of the naturally occurring L-amino acids
FFVFLVEMGFRHVGQXGLELLTSGYPSXLTSQSAGITGMSHHXR

SEQ ID NO: 393 - protein, 25 aa, Homo sapiens
QGSCLSLPSSWGYRCPPPHPGNFLY

SEQ ID NO: 394 - protein, 25 aa, Homo sapiens
  SITE (6): Xaa equals any of the naturally occurring L-amino acids
MFFCFXRWEPCSVTQAGVQWCDLSS

SEQ ID NO: 395 - protein, 18 aa, Homo sapiens
PASASRVAGVTGAPHHTQ

SEQ ID NO: 396 - protein, 15 aa, Homo sapiens
  SITE (2): Xaa equals any of the naturally occurring L-amino acids
LXKCWDYRYEPPRPA

SEQ ID NO: 397 - protein, 157 aa, Homo sapiens
  SITE (141): Xaa equals any of the naturally occurring L-amino acids
VNPEVWMNTSEIIIYNGYPSEEYEVTTEDGYILLVNRIPYGRTHARSTGPRPVVYMQHALFADNAYWLENYANGSLGFLLADAGYDVWMGNSRGNTWSRRHKTLSETDEKFWAFSFDEMAKYDLPGVIDFIVNKTGQEKLXFIGHSLGTTIGFVAFS

SEQ ID NO: 398 - protein, 16 aa, Homo sapiens
MPELAQRIKMNFALGP

SEQ ID NO: 399 - protein, 75 aa, Homo sapiens
  SITE (55): Xaa equals any of the naturally occurring L-amino acids
  SITE (72): Xaa equals any of the naturally occurring L-amino acids
FFLRQCLILLPRLECSGMSITHCSLDLLGSSNPPTSVSHVVWTTGTHHRDWLIFXFFVEMESHFFAQAGWSXLNS

SEQ ID NO: 400 - protein, 28 aa, Homo sapiens
  SITE (6): Xaa equals any of the naturally occurring L-amino acids
IKFLGXSDPPILCSQSAGITGMSHCAHP

SEQ ID NO: 401 - protein, 237 aa, Homo sapiens
  SITE (226): Xaa equals any of the naturally occurring L-amino acids
KSSDGPGAAQEPTWLTDVPAAMEFIAATEVAVIGFFQDLEIPAVPILHSMVQKFPGVSFGISTDSEVLTHYNITGNTICLFRLVDNEQLNLEDEDIESIDATKLSRFIEINSLHMVTEYNPVASPEYEENMHRYQKAAKLFQGKILFILVDSGMKENGKVISFFKLKESQLPALAIYQTLDDEWDTLPTAEVSVEHVQNFCDGFLSGKLLKENRESEGKTPKVELXLLLGTTYGQVS

SEQ ID NO: 402 - protein, 209 aa, Homo sapiens
DGADVNYQSKEGKSPLHMAAIHGRFTRSQILIQNGSEIDCADKFGNTPLHVAARYGHELLISTLMTNGADTARRGIHDMFPLHLAVLFGFSDCCRKLLSSGQLYSIVSSLSNEHVLSAGFDINTPDNLGRTCLHAAASGGNVECLNLLLSSGADLRRRDKFGRTPLHYAAANGSYQCAVTLVTAGAGVNEADCKGCSPLHYAAASDTYR

SEQ ID NO: 403 - protein, 192 aa, Homo sapiens
KSPLHMAAIHGRFTRSQILIQNGSEIDCADKFGNTPLHVAARYGHELLISTLMTNGADTARRGIHDMFPLHLAVLFGFSDCCRKLLSSGQLYSIVSSLSNEHVLSAGFDINTPDNLGRTCLHAAASGGNVECLNLLLSSGADLRRRDKFGRTPLHYAAANGSYQCAVTLVTAGAGVNEADCKGCSPLHYAAA

SEQ ID NO: 404 - protein, 270 aa, Homo sapiens
  SITE (252): Xaa equals any of the naturally occurring L-amino acids
MGPPPGAGVSCRGGCGFSRLLAWCFLLALSPQAPGSRGAEAVWTAYLNVSWRVPHTGVNRTVWELSEEGVYGQDSPLEPVAGVLVPPDGPGALNACNPHTNFTVPTVWGSTVQVSWLALIQRGGGCTFADKIHLAYERGASGAVIFNFPGTRNEVIPMSHPGAVDIVAIMIGNLKGTKILQSIQRGIQVTMVIEVGKKHGPWVNHYSIFFRFCVLFYYYGGNCGLFYLLFCSKATECKSSKQEAEAIKGRCXKSYWKASTTHTETRRQGN

SEQ ID NO: 405 - protein, 63 aa, Homo sapiens
  SITE (43): Xaa equals any of the naturally occurring L-amino acids
FFYFYFLRWSLGLLPRLECSGTISAHCKLRLPDTNNSPASASXVAGITGACHHAWLIFLFLVD

SEQ ID NO: 406 - protein, 27 aa, Homo sapiens
KGCLPFSSSSSWPGVPTLASLFGRLWF

SEQ ID NO: 407 - protein, 92 aa, Homo sapiens
ISDLVGRVVSGWLGDAVPGPVTRLLMLWTTLTGVSLALFPVAQAPTALVALAVAYGFTSGALAPLAFSVLPELIGTRRIYCGLGLLQMIESI

SEQ ID NO: 408 - protein, 221 aa, Homo sapiens
  SITE (176): Xaa equals any of the naturally occurring L-amino acids
RFEFCEPAFVVGNCLQIASDSHQYDRIYCGAGVQKDHENYMKILLKVGGILVMPIEDQLTQIMRTGQNTWESKNILAVSFAPLVQPSKNDNGKPDSVGLPPCAVRNLQDLARIYIRRTLRNFINDEMQAKGIPQRAPPKRKRKRVKQRINTYVFVGNQLIPQPLDSEEDEKMEEDXKEEEEKDHNEAMKPEEPPQNLLREKIMKLPLPESLKAYLTYFRDK

SEQ ID NO: 409 - protein, 137 aa, Homo sapiens
  SITE (136): Xaa equals any of the naturally occurring L-amino acids
LFSCHRSEKTCRRWMALDYAGISIGILGCYVSGVFYAFYCNNYWRQVYLITVLAMILAVFFAQIHPNYLTQQWQRLRSIIFCSVSGYGVIPTLHWVWLNGGIGAPIVQDFAPRVIVMYMIALLAFLFYISKVPERXF

SEQ ID NO: 410 - protein, 121 aa, Homo sapiens
ETAAEYVKSRLPEALKQHLQDYEKDKENSVLSYQTILEQQILSIDREMLEKLTVSYDEAGTTCLIALLSDKDLTVANVGDSRGVLCDKDGNAIPLSHDHKPYQLKERKRIKRAGGFISFNG

SEQ ID NO: 411 - protein, 37 aa, Homo sapiens
  SITE (19): Xaa equals any of the naturally occurring L-amino acids
AHCSLKLPGSSHPLASASXVAGITGVHHCHTQLIFNF

SEQ ID NO: 412 - protein, 54 aa, Homo sapiens
  SITE (36): Xaa equals any of the naturally occurring L-amino acids
DTEFHSVTQAGVEWCHLSSLQPLPPGFKQFSCLSLXSSWDYRHVPPCLANFCIF

SEQ ID NO: 413 - protein, 50 aa, Homo sapiens
  SITE (32): Xaa equals any of the naturally occurring L-amino acids
HSVTQAGVEWCHLSSLQPLPPGFKQFSCLSLXSSWDYRHVPPCLANFCIF

SEQ ID NO: 414 - protein, 94 aa, Homo sapiens
  SITE (62): Xaa equals any of the naturally occurring L-amino acids
STHCNLRLLGSSDSPASASRVAGVTGMCHHAQLIFVLLVETGFCHVGQAGLELLTSHDLRTXASQSVGITGVSHRTRPGLPLCTYFVEAELRPG

SEQ ID NO: 415 - protein, 34 aa, Homo sapiens
  SITE (7): Xaa equals any of the naturally occurring L-amino acids
  SITE (23): Xaa equals any of the naturally occurring L-amino acids
PYLPHFXIFCRDGVSLCCPGWSXTPEFKQSSALA

SEQ ID NO: 416 - protein, 13 aa, Homo sapiens
ECWDYRHEPSCLA

SEQ ID NO: 417 - protein, 7 aa, Homo sapiens
LPKCWSA

SEQ ID NO: 418 - protein, 317 aa, Homo sapiens
VAVLCVCDLSPAQCDINCCCDPDCSSVDFSVFSACSVPVVTGDSQFCSQKAVIYSLNFTANPPQRVFELVDQINPSIFCIHITNYKPALSFINPEVPDENNFDTLMKTSDGFTLNAESYVSFTTKLDIPTAAKYEYGVPLQTSDSFLRFPSSLTSSLCTDNNPAAFLVNQAVKCTRKINLEQCEEIEALSMAFYSSPEILRVPDSRKKVPITVQSIVIQSLNKTLTRREDTDVLQPTLVNAGHFSLCVNVVLEVKYSLTYTDAGEVTKADLSFVLGTVSSVVVPLQQKFEIHFLQENTQPVPLSGNPGYVVGLPLAA

SEQ ID NO: 419 - protein, 118 aa, Homo sapiens
  SITE (9): Xaa equals any of the naturally occurring L-amino acids
  SITE (91): Xaa equals any of the naturally occurring L-amino acids
CLLHPIIPXPVINGYRNKSTFSVNRGPDGNPKTVGFYLGTWRDGNVVCVQSNHLKNIPEKHSQVAQYYEVFLRQSPLEPCLVFHEGGYWRXLTVRTNSQGHTMAIITFHPQKLSQEEL

SEQ ID NO: 420 - protein, 15 aa, Homo sapiens
GPGAACGLTSLYFQE

SEQ ID NO: 421 - protein, 54 aa, Homo sapiens
GWQALREESHCTASDTSSPWWVSSPNQDCFPGMPEIHQDGHSSFWAQYVREISP

SEQ ID NO: 422 - protein, 191 aa, Homo sapiens
  SITE (130): Xaa equals any of the naturally occurring L-amino acids
NCQEMSNTNGSAITEFILLGLTDCPELQSLLFVLFLVVYLVTLLGNLGMIMLMRLDSRLHTPMYFFLTNLAFVDLCYTSNATPQMSTNIVSEKTISFAGCFTQCYIFIALLLTEFYMLAAMAYDRYVAIXDPLRYSVKTSRRVCICLATFPYVYGFSDGLFQAILTFRLTFCRSNVINHFYCADPPLIKLS

SEQ ID NO: 423 - protein, 110 aa, Homo sapiens
  SITE (65): Xaa equals any of the naturally occurring L-amino acids
  SITE (90): Xaa equals any of the naturally occurring L-amino acids
  SITE (97): Xaa equals any of the naturally occurring L-amino acids
  SITE (103): Xaa equals any of the naturally occurring L-amino acids
DICGSRNSCVSCVDGNATCFWIECKGKSYCSDNSTAGDCKVVNTTGFCSAKTTTLPSTTTTSTTXTTSGTTNTTLSPTIQPTRKSTFDAXQFHWRNXPCLGVXAVIFFLY

SEQ ID NO: 424 - protein, 146 aa, Homo sapiens
LKKTWARWRHMFREQPVDEIRNYFGEKVALYFVWLGWYTYMLVPAALTGLLVFLSGFSLFEASQISKEICEAHDILMCPLGDHSRRYQRLSETCTFAKLTHLFDNDGTVVFAIFMALWATVFLEIWKRQRARVVLHWDLYVWDEEQ

SEQ ID NO: 425 - protein, 44 aa, Homo sapiens
MESRSVSQAGGQWRDLGSLQPPPPRFKRFSCLGLPKCWDYRHEP

SEQ ID NO: 426 - protein, 40 aa, Homo sapiens
SVSQAGGQWRDLGSLQPPPPRFKRFSCLGLPKCWDYRHEP

SEQ ID NO: 427 - protein, 66 aa, Homo sapiens
  SITE (28): Xaa equals any of the naturally occurring L-amino acids
  SITE (39): Xaa equals any of the naturally occurring L-amino acids
PRLKQSFCLDLPRCWDYRHEPLHLAFIXFLSFFLSFFFXMESRSVSQAGGQWRDLGSLQPPPPRFK

SEQ ID NO: 428 - protein, 44 aa, Homo sapiens
  SITE (7): Xaa equals any of the naturally occurring L-amino acids
AQAGVQXLNLSSLQPQPAGLKQSSHPSLPSSWDYRYSTPHPANF

SEQ ID NO: 429 - protein, 31 aa, Homo sapiens
FFCRDGISPCCPGWSRTPRLRRSAHLNLPQC

SEQ ID NO: 430 - protein, 356 aa, Homo sapiens
  SITE (189): Xaa equals any of the naturally occurring L-amino acids
  SITE (253): Xaa equals any of the naturally occurring L-amino acids
MFGTLLLYCFFLATVPALAETGGERQLSPEKSEIWGPGLKADVVLPARYFYIQAVDTSGNKFTSSPGEKVFQVKVSAPEEQFTRVGVQVLDRKDGSFIVRYRMYASYKNLKVEVKFQGQHVAKSPYILKGPVYHENCDCPLQDSAAWLREMNCPETIAQIQRDLAHFPAVDPEKIAVEIPKRFGQRQSXCHYTLKDNKVYIKTHGEHVGFRIFMDAILLSLTRKVKMPDVELFVNLGDWPLEKKKSNSNIHPXFSWCGSTDSKDIVMPTYDLTDSVLETMGRVSLDMMSVQANTGPPWESKNSTAVWRGRDSRKERLELVKLSRKHPELIDAAFTNFFFFKHDENLYGPIVNIFHF

SEQ ID NO: 431 - protein, 151 aa, Homo sapiens
  SITE (14): Xaa equals any of the naturally occurring L-amino acids
  SITE (70): Xaa equals any of the naturally occurring L-amino acids
EHISFFDFFKHKYXINIDGTVAAYRLPYLLVGDSVVLKQDSIYYEHFYNELQPWKHYIPVKSNLSDLLEXLKWAKDHDEEAKKIAKAGQEFARNNLMGDDIFCYYFKLFQEYANLQVSEPQIREGMKRVEPQTEDDLFPCTCHRKKTKDEL

SEQ ID NO: 432 - protein, 158 aa, Homo sapiens
DWLTEKPELFQLALKAFRYTLKLMIDKASLGPIEDFRELIKYLEEYERDWYIGLVSDEKWKEAILQEKPYLFSLGYDSNMGIYTGRVLSLQELLIQVGKLNPEAVRGQWANLSWELLYATNDDEERYSIQAHPLLLRNLTVQAAEPPLGYPIYSSKPL

SEQ ID NO: 433 - protein, 120 aa, Homo sapiens
  SITE (64): Xaa equals any of the naturally occurring L-amino acids
VRMEMASSAGSWLSGCLIPLVFLRLSVHVSGHAGDAGKFHVALLGGTAELLCPLSLWPGTVPKXVRWLRSPFPQRSQAVHIFRDGKDQDEDLMPEYKGRTVLVRDAQEGSVTLQILDVRL

SEQ ID NO: 434 - protein, 143 aa, Homo sapiens
DPHQLFDDTSSAQSRGYGAQRAPGGLSYPAASPTPHAAFLADPVSNMAMAYGSSLAAQGKELVDKNIDRFIPITKLKYYFAVDTMYVGRKLGLLFFPYLHQDWEVQYQQDTPVAPRFDVNAPDLYIPAMAFITYVLVAGLRWG

SEQ ID NO: 435 - protein, 179 aa, Homo sapiens
  SITE (102): Xaa equals any of the naturally occurring L-amino acids
  SITE (160): Xaa equals any of the naturally occurring L-amino acids
MNMSVLTLQEYEFEKQFNENEAIQWMQENWKKSFLFSALYAAFIFGGRHLMNKRAKFELRKPLVLWSLTLAVFSIFGALRTGAYMVYILMTKGLKQSVCDQXFYNGPVSKFWAYAFVLSKAPELGDTIFIILRKQKLIFLHWYHHITVLLYSWYSYKDMXCRGGWFMTMNYGVHAVMYS

SEQ ID NO: 436 - protein, 98 aa, Homo sapiens
RWNFSLIAQAGVQWHDLGSPQPPPPGLKRFSFLGLPSSWDYRHAPPCPANFVFLVEMGFLHVGQAGLELPTSGGPPAWASQSAGITGVSHRAWPENSH

SEQ ID NO: 437 - protein, 583 aa, Homo sapiens
VTRQDMNDAVITLNGLEKRFPGMDKPAVAPLDCTIHAGYVTGLVGPDGAGKTTLMRMLAGLLKPDSGSATVIGFDPIKNDGALHAVLGYMPQKFGLYEDLTVMENLNLYADLRSVTGEARKQTFARLLEFTSLGPFTGRLAGKLSGGMKQKLGLACTLVGEPKVLLLDEPGVGVDPISRRELWQMVHELAGEGMLILWSTSYLDEAEQCRDVLLMNEGELLYQGEPKALTQTMAGRSFLMTSPHEGNRKLLQRALKLPQVSDGMIQGKSVRLILKKEATPDDIRHADGMPEININETTPRFEDAFIDLLGGAGTSESPLGAILHTVEGTPGETVIEAKELTKKFGDFAATDHVNFAVKRGEIFGLLGPNGAGKSTTFKMMCGLLVPTSGQALVLGMDLKESSGKARQHLGYMAQKFSLYGNLTVEQNLRFFSGVYGLRGRAQNEKISRMSEAFGLKSIASHATDELPLGFKQRLALACSLMHEPDILFLDEPTSGVDPLTRREFWLHINSMVEKGVTVMVTTHFMDEAEYCDRIGLVYRGKLIASGTPDDLKAQSANDEQPDPTMEQAFIQLIHDWDKEHSNE

SEQ ID NO: 438 - protein, 72 aa, Homo sapiens
SIELLGSDDLSTSASQVVGTLGMLCHAWLLLMYLFLEMRSHCVAQTGLELLASSHPPFSASTVAGISGTCHC

SEQ ID NO: 439 - protein, 143 aa, Homo sapiens; identical to SEQ ID NO: 434

SEQ ID NO: 440 - protein, 234 aa, Homo sapiens
  SITE (10): Xaa equals any of the naturally occurring L-amino acids
  SITE (93): Xaa equals any of the naturally occurring L-amino acids
  SITE (95): Xaa equals any of the naturally occurring L-amino acids
  SITE (101): Xaa equals any of the naturally occurring L-amino acids
GPAPCPTLGXSCCCSCCCCPSGAKPTQAATGSQGCPACPGHQGRMGTTDCRGPRGSQESQPFPGSEDPKGRRENPAYPAILGKMAPWDPLGCXGXPAPWAXLESQKFQSVFTVTRQTHQPPAPNSLIRFNAVLTNPQGDYDTSTGKFTCKVPGLYYFVYHASHTANLCVLLYRSGVKVVTFCGHTSKTNQVNSGGVLLRLQVGEEVWLAVNDYYDMVGIQGSDSVFSGFLLFPD

SEQ ID NO: 441 - protein, 97 aa, Homo sapiens
GFTLWGSEYSWNWNAIDEGPKRDIVKELEVAIRNRTDLRFGLYYSLFEWFHPLFLEDESSSFHKRQFPVSKTLPELYELVNNYQPEVLWSDGDGGEP

SEQ ID NO: 442 - protein, 50 aa, Homo sapiens
AHSATRFDPTWESLDARQLPAWFDQAKFGIFIHWGVFSVPSFGSEWFWLY

SEQ ID NO: 443 - protein, 28 aa, Homo sapiens
YWNSTGFLAWLYNESPVRGTVVTNDRWG

SEQ ID NO: 444 - protein, 309 aa, Homo sapiens
FHFTDCLFFGSLMSATDPVTVLAIFHELHVDPDLYTLLFGESVLNDAVAIVLTYSISIYSPKENPNAFDAAAFFQSVGNFLGIFAGSFAMGSAYAIITALLTKFTKLCEFPMLETGLFFLLSWSAFLSAEAAGLTGIVAVLFCGVTQAHYTYNNLSSDSKIRTKQLFEFMNFLAENVIFCYMGLALFTFQNHIFNALFILGAFLAIFVARACNIYPLSFLLNLGRKQKIPWNFQHMMMFSGLRGAIAFALAIRNTESQPKQMMFTTTLLLVFFTVWVFGGGTTPMLTWLQIRVGVDLDENLKEDPSSQH

SEQ ID NO: 445 - protein, 94 aa, Homo sapiens
  SITE (22): Xaa equals any of the naturally occurring L-amino acids
SMEVGVCVEAYRQEAETHRRHXNSAFMTFVVLDADDQPQLLPWIRPQPGDGERRYREASARKKIRLDRKYIVSCKQTEVPLSVPWDPSNQVYLS

What is claimed is:

1. An isolated nucleic acid molecule comprising a polynucleotide having a nucleotide sequence at least 95% identical to a sequence selected from the group consisting of:
(a) a polynucleotide fragment of SEQ ID NO:X or a polynucleotide fragment of the cDNA sequence included in ATCC Deposit No:Z, which is hybridizable to SEQ ID NO:X;
(b) a polynucleotide encoding a polypeptide fragment of SEQ ID NO:Y or a polypeptide fragment encoded by the cDNA sequence included in ATCC Deposit No:Z, which is hybridizable to SEQ ID NO:X;
(c) a polynucleotide encoding a polypeptide domain of SEQ ID NO:Y or a polypeptide domain encoded by the cDNA sequence included in ATCC Deposit No:Z, which is hybridizable to SEQ ID NO:X;
(d) a polynucleotide encoding a polypeptide epitope of SEQ ID NO:Y or a polypeptide epitope encoded by the cDNA sequence included in ATCC Deposit No:Z, which is hybridizable to SEQ ID NO:X;
(e) a polynucleotide encoding a polypeptide of SEQ ID NO:Y or the cDNA sequence included in ATCC Deposit No:Z, which is hybridizable to SEQ ID NO:X, having biological activity;
(f) a polynucleotide which is a variant of SEQ ID NO:X;
(g) a polynucleotide which is an allelic variant of SEQ ID NO:X;
(h) a polynucleotide which encodes a species homologue of the SEQ ID NO:Y;
(i) a polynucleotide capable of hybridizing under stringent conditions to any one of the polynucleotides specified in (a)-(h), wherein said polynucleotide does not hybridize under stringent conditions to a nucleic acid molecule having a nucleotide sequence of only A residues or of only T residues.

2. The isolated nucleic acid molecule of claim 1, wherein the polynucleotide fragment comprises a nucleotide sequence encoding a secreted protein.

3. The isolated nucleic acid molecule of claim 1, wherein the polynucleotide fragment comprises a nucleotide sequence encoding the sequence identified as SEQ ID NO:Y or the polypeptide encoded by the cDNA sequence included in ATCC Deposit No:Z, which is hybridizable to SEQ ID NO:X.

4. The isolated nucleic acid molecule of claim 1, wherein the polynucleotide fragment comprises the entire nucleotide sequence of SEQ ID NO:X or the cDNA sequence included in ATCC Deposit No:Z, which is hybridizable to SEQ ID NO:X.

5. The isolated nucleic acid molecule of claim 2, wherein the nucleotide sequence comprises sequential nucleotide deletions from either the C-terminus or the N-terminus.

6. The isolated nucleic acid molecule of claim 3, wherein the nucleotide sequence comprises sequential nucleotide deletions from either the C-terminus or the N-terminus.

7. A recombinant vector comprising the isolated nucleic acid molecule of claim 1.

8. A method of making a recombinant host cell comprising the isolated nucleic acid molecule of claim 1.

9. A recombinant host cell produced by the method of claim 8.

10. The recombinant host cell of claim 9 comprising vector sequences.

11. An isolated polypeptide comprising an amino acid sequence at least 95% identical to a sequence selected from the group consisting of:
(a) a polypeptide fragment of SEQ ID NO:Y or the encoded sequence included in ATCC Deposit No:Z;
(b) a polypeptide fragment of SEQ ID NO:Y or the encoded sequence included in ATCC Deposit No:Z, having biological activity;
(c) a polypeptide domain of SEQ ID NO:Y or the encoded sequence included in ATCC Deposit No:Z;
(d) a polypeptide epitope of SEQ ID NO:Y or the encoded sequence included in ATCC Deposit No:Z;
(e) a secreted form of SEQ ID NO:Y or the encoded sequence included in ATCC Deposit No:Z;
(f) a full length protein of SEQ ID NO:Y or the encoded sequence included in ATCC Deposit No:Z;
(g) a variant of SEQ ID NO:Y;
(h) an allelic variant of SEQ ID NO:Y; or
(i) a species homologue of the SEQ ID NO:Y.

12. The isolated polypeptide of claim 11, wherein the secreted form or the full length protein comprises sequential amino acid deletions from either the C-terminus or the N-terminus.

13. An isolated antibody that binds specifically to the isolated polypeptide of claim 11.

14. A recombinant host cell that expresses the isolated polypeptide of claim 11.

15. A method of making an isolated polypeptide comprising:
(a) culturing the recombinant host cell of claim 14 under conditions such that said polypeptide is expressed; and
(b) recovering said polypeptide.

16. The polypeptide produced by claim 15.

17. A method for preventing, treating, or ameliorating a medical condition, comprising administering to a mammalian subject a therapeutically effective amount of the polynucleotide of claim 1.

18. A method of diagnosing a pathological condition or a susceptibility to a pathological condition in a subject comprising:
(a) determining the presence or absence of a mutation in the polynucleotide of claim 1; and
(b) diagnosing a pathological condition or a susceptibility to a pathological condition based on the presence or absence of said mutation.

19. A method of diagnosing a pathological condition or a susceptibility to a pathological condition in a subject comprising:
(a) determining the presence or amount of expression of the polypeptide of claim 11 in a biological sample; and
(b) diagnosing a pathological condition or a susceptibility to a pathological condition based on the presence or amount of expression of the polypeptide.

20. A method for identifying a binding partner to the polypeptide of claim 11 comprising:
(a) contacting the polypeptide of claim 11 with a binding partner; and
(b) determining whether the binding partner effects an activity of the polypeptide.

21. The gene corresponding to the cDNA sequence of SEQ ID NO:Y.

22. A method of identifying an activity in a biological assay, wherein the method comprises:
(a) expressing SEQ ID NO:X in a cell;
(b) isolating the supernatant;
(c) detecting an activity in a biological assay; and
(d) identifying the protein in the supernatant having the activity.

23. The product produced by the method of claim 20.

24. A method for preventing, treating, or ameliorating a medical condition, comprising administering to a mammalian subject a therapeutically effective amount of the polypeptide of claim 11.
